(19) United States
(12) Patent Application Publication
(10) Pub. No.: US 2026/0069524 A1
(43) Pub. Date: Mar. 12, 2026

(54) COSMETIC AND PERSONAL CARE COMPOSITIONS COMPRISING RECOMBINANT SILK

(71) Applicant: BOLT THREADS , INC., Emeryville, CA (US)

(72) Inventor: Lindsay Wray, Emeryville, CA (US)

(21) Appl. No.: 18/706,281

(22) PCT Filed: Nov. 2, 2022
(86) PCT No.: PCT/US2022/079160

§ 371 Date: Apr. 30, 2024

Related U.S. Application Data
(60) Provisional application No. 63/274,837, filed on Nov. 2, 2021.
(60) Provisional application No. 63/302,793, filed on Jan. 25, 2022.

(51) Int. Cl. A61K 8/64; A61K 8/04; A61K 8/34; A61K 8/365; A61K 8/368; A61K 8/41; A61K 8/49; A61K 8/81; A61Q 1/02; A61Q 5/00; A61Q 5/02; A61Q 5/06; A61Q 17/04; A61Q 19/00

(52) U.S. Cl. CPC A61K 8/64; A61K 8/042; A61K 8/345; A61K 8/365; A61K 8/368; A61K 8/416; A61K 8/498; A61K 8/8152; A61Q 1/02; A61Q 5/00; A61Q 5/02; A61Q 5/06; A61Q 17/04; A61Q 19/00; A61K 2800/34; A61K 2800/43; A61K 2800/51; A61K 2800/524

(57) ABSTRACT

Disclosed herein is a composition comprising recombinant silk polypeptide and use thereof as silicone (both “fluid” and “elastomer”) replacement in beauty and personal care formulations for influencing skin and hair properties and can include benefits to the formulations themselves, such as increasing formulation viscosity.

### FIELD OF THE INVENTION

[0001] The present invention relates to a composition comprising recombinant silk polypeptide and use thereof as silicone (both “fluid” and “elastomer”) replacements in beauty and personal care formulations for influencing skin and hair properties and can include benefits to the formulations themselves, such as increasing formulation viscosity. For skin, these properties can include long-lasting wear, silky soft feel, matte finish, enhanced pigment delivery, spreadability, quick absorption, wrinkle blurring effect, and UV and pollution defense. For hair, these properties can include long-lasting wear, shine, non-greasiness, frizz control, adding thickness to the hair, styling retention, resistance to heat, and UV and pollution defense.

### BACKGROUND

[0002] Silicone polymers are a broad chemical family with the commonality of alternating silicon and oxygen atoms making up the backbone of the polymer. Generally speaking, “liquid” silicone polymers or “silicone fluids” refers to high molecular weight silicone polymers that may or may not contain functional groups. These polymers can also be referred to as “dimethicone”. Silicone elastomers refer to the types of silicones where the linear silicone polymer has been crosslinked to form a gel-like network.

[0003] Silicone fluids and silicone elastomers are widely used in the beauty and personal care industry. For example silicone elastomers are known for leaving the skin feeling soft and velvety as well as imparting a matte finish to the skin. Some common applications of silicones are BB creams, anti-aging wrinkle reducers, primers, liquid foundations, mousse foundations, gelled eye shadows and many more.

[0004] While fluid silicones and silicone elastomers provide benefits to skin, hair, and personal care applications, silicones are harder to wash off and can get stuck in pores. This is because silicones are hydrophobic and they repel water. For this reason, silicone-based products don't rinse away easily. Also silicones are not eco-friendly-they have an extremely slow biodegradation rate in the environment and as such they can bioaccumulate. Once they are rinsed down the drain, they contribute to the buildup of sludge pollution in oceans and waterways and may not break down for decades or even hundreds of years (Horii Y., Kannan K. (2019) Main Uses and Environmental Emissions of Volatile Methylsiloxanes. In: Homem V., Ratola N. (eds) Volatile Methylsiloxanes in the Environment. The Handbook of Environmental Chemistry, vol 89. Springer, Cham. https://doi.org/10.1007/698_2019_375).

[0005] To date, there is an unmet need for silicone elastomer alternative ingredients that meet the same performance level as silicone elastomers while also being biobased and biodegradable. Many ingredients aspect to make a “greener” silicone elastomer by replacing the cyclosiloxane diluent (which usually accompanies silicone elastomers) with a biobased alternative. While this is a step in the right direction, it still falls very short in solving the problem at hand, which is that the silicone elastomer is still not biodegradable.

### BRIEF DESCRIPTION OF THE DRAWINGS

[0006] The foregoing and other objects, features and advantages will be apparent from the following description of particular embodiments of the invention, as illustrated in the accompanying drawings in which like reference characters refer to the same parts throughout the different views. The drawings are not necessarily to scale, emphasis instead placed upon illustrating the principles of various embodiments of the invention.

[0007] FIG. 1A illustrates a top-down view of the SPF formulations.

[0008] FIG. 1B shows a spider chart plotting data from a blind test comparison of SPF formulations.

[0009] FIG. 1C shows ingredients used in all SPF formulations (not including recombinant silk polypeptide and silicones).

[0010] FIG. 1D illustrates elastic modulus, viscous modulus and phase angle vs. frequency for SPF base formulation, SPF formulation with 1.5% recombinant silk polypeptide, and SPF formulation with 2% silicones.

[0011] FIG. 1E shows light microscopy images of SPF base and SPF base formulated with 1% b-silk protein (i.e., an 18B silk; a recombinant silk comprising SEQ ID NO: 2878) or 5% silicone elastomer ingredient. A reference image of 1% recombinant silk polypeptide powder suspended in water is also shown.

[0012] FIG. 2A illustrates a top-down view of 3-in-1 cream eye/cheek/lip formulation (i.e., color cosmetic) with 1% recombinant silk polypeptide or 10% silicone elastomer.

[0013] FIG. 2B illustrates a flow chart for evaluation of the color cosmetic for pigment delivery and substantiation to skin.

[0014] FIG. 2C shows representative images of color cosmetic application and wipe-off for a color cosmetic with i) 1% recombinant silk polypeptide, ii) 5% silicone elastomer, and iii) 10% silicone elastomer.

[0015] FIG. 2D shows ingredients used in all color cosmetic formulations (not including recombinant silk polypeptide and silicones).

[0016] FIG. 2E shows light microscopy images of color cosmetic base and the base formulated with 1% recombinant silk polypeptide or 5% silicone elastomer ingredient.

[0017] FIG. 2F shows a chart of elastic modulus, viscous modulus and phase angle vs. frequency for color cosmetic base, color cosmetic with 1% recombinant silk polypeptide, and color cosmetic with 5% silicone elastomer.

[0018] FIG. 3A shows light microscopy images of hair serum formulations with and without 1% recombinant silk polypeptide and 5% silicone elastomer. A reference image of 1% recombinant silk polypeptide powder suspended in water is also shown.

[0019] FIG. 3B shows SEM images of yak hair at 150× and 800× magnification that has i) not been treated, ii) treated with serum base, iii) treated with serum base with 1% recombinant silk protein, and iv) treated with serum base with 5% elastomer.

[0020] FIG. 3C shows a chart of elastic modulus, viscous modulus and phase angle vs. frequency (bottom row) or vs. shear strain (top row) for color hair serum base, hair serum base with 1% recombinant silk protein, and hair serum base with 5% silicone elastomer.

[0021] FIG. 3D is a table of ingredients used in the hair serum base formulation (not including the recombinant silk polypeptide and silicone elastomers).

[0022] FIG. 4A shows a comparison of the G′ and G″ of an industry standard silicone elastomer gel (dry solids of 30%) and 12% recombinant silk polypeptide on a chart of elastic modulus, viscous modulus and phase angle vs. frequency (top row) or viscosity vs. shear rate (bottom row).

[0023] FIG. 4B shows SEM images of the neat recombinant silk polypeptide and silicone elastomer dispersed onto yak hair at 150× and 800× magnification.

[0024] FIG. 5 shows image of hair swatches after exposure to the curl retention testing after application of leave-in hair serum containing serum base only, or serum base with either 1% silk polypeptide, 1% keratin ingredient, or 5% silicone elastomer ingredient.

[0025] FIG. 6 is a table of ingredients used in the wash-off shampoo formulation (not including the recombinant silk polypeptide and silicone elastomers) described in Example 6.

[0026] FIG. 7 is a table of ingredients used in the leave-on skin serum (not including the recombinant silk polypeptide and silicone elastomers) described in Example 7.

[0027] FIG. 8 is a table of ingredients used in the leave-on skin primer (not including the recombinant silk polypeptide and silicone elastomers) described in Example 8.

[0028] FIG. 9A is a graph of shear viscosity as a function of shear rate for the composition of FIG. 6 containing different amounts of recombinant silk polypeptide as compared to a placebo.

[0029] FIG. 9B is a chart showing the change in viscosity from placebo for the compositions tested in FIG. 9A.

[0030] FIGS. 10A and 10B are charts showing the change in rheology (G′ and G″) for the compositions tested in FIG. 9A.

[0031] FIG. 11 is a chart showing change in viscosity from placebo for compositions of FIG. 7 having different amounts of recombinant silk polypeptide.

[0032] FIG. 12A is a graph of shear viscosity as a function of shear rate for the composition of FIG. 8 containing different amounts of recombinant silk polypeptide as compared to a placebo.

[0033] FIG. 12B is a chart showing the change in viscosity from placebo for the compositions tested in FIG. 12A.

### DETAILED DESCRIPTION

[0034] The details of various embodiments of the invention are set forth in the description below. Other features, objects, and advantages of the invention will be apparent from the description and the drawings, and from the aspects.

[0035] This invention relates to the use of a recombinant silk polypeptide as a silicone replacement within a personal care and/or cosmetic composition for providing benefits to cosmetics, skin and hair that would normally be associated with linear silicones and silicone elastomers. The skin, hair or cosmetic compositions of the disclosure can have any standard ingredients typically included in such compositions, including active ingredients, pigments, and additives. The silicone replacement comprising a recombinant silk polypeptide can be used in combination with any standard hair care, skin care, or cosmetic ingredients to form compositions of the disclosure in which a silicone (fluid or elastomer) typically included in such compositions is replaced. Any skin, hair or cosmetic composition type is contemplated herein for use with the silicon elastomer replacement component, such as, but not limited to, SPF formulation, a color cosmetic, wash-off hair shampoo, skin serum, skin primer, or a hair serum. The recombinant silk polypeptide can deliver these benefits at equal or decreased loading levels compared to the silicone component. Advantageously, it has been observed that recombinant silk polypeptides as silicone replacements can maintain the G′ and G″ rheology curve shapes as inclusion of a silicone. Further, in some compositions, the recombinant silk polypeptide was found to significantly increase the viscosity of the formulation as compared to an equivalent amount of silicone, thereby allowing for significantly reduced loading levels of the recombinant silk polypeptide as compared to a silicone. Moreover the recombinant silk polypeptide is biodegradable and will degrade in the environment (for example, once washed down the drain), while the silicone component is not biodegradable.

[0036] Cosmetic, hair, or skin care compositions in accordance with the disclosure include a silicone replacement component comprising a recombinant silk polypeptide and one or more active ingredients for cosmetic, skin, or hair care. The compositions of the disclosure can be substantially free of silicone. Reference to “silicone” herein should be understood unless otherwise state to include both silicone fluid and silicone elastomer. For example, the compositions of the disclosure can have less than 0.1% silicone. For example, the composition of the disclosure can have less than 0.1% silicone elastomer.

[0037] Recombinant silk polypeptide is a high molecular weight polypeptide that has entropically self-assembled into a cross-linked and semicrystalline state. The recombinant polypeptide can be included in the composition as a powder. For example, hollow particles of recombinant silk polypeptide can be milled and included in the composition as a milled powder. The silicone replacement component can include the recombinant silk polypeptide present suspended in a solvent. The silicone replacement component can include the recombinant silk polypeptide as a randomly structure gel. At the macro-level this could range from a low viscosity weak gel suspended within an aqueous solvent (sometimes referred to as “slurry”), to a dry hollow powder particle (<15% moisture content).

[0038] In some embodiments, provided herein is a composition comprising recombinant silk polypeptide and use thereof as silicone replacements in beauty and personal care formulations.

[0039] In some embodiments, the recombinant silk polypeptide is a high molecular weight polypeptide greater than >100 amino acids in length and less than 90 kDa amino acids in length.

[0040] In some embodiments, the recombinant silk polypeptide is self-assembled into a semicrystalline state in which the crystalline portion is characterized by beta-sheet crosslinks that are resistant to solubility in water at pH from 3-8, other polar and non polar solvents (hexanol, hexane, benzene), oils, waxes, surfactants (anionic, non-ionic, cationic, amphoteric) but easily dispersed in these materials to form a heterogeneous dispersion.

[0041] In some embodiments, the recombinant silk polypeptide exists as a randomly structured gel. This gel can also include the presence of preservative and chelating agents. In various aspects, the recombinant silk polypeptide exists as a hollow powder. The hollow powder can be milled such that the powder incorporated into the composition as a milled powder. The powder can also include or be mixed with preservative and chelating agents.

[0042] In some embodiments, the recombinant silk polypeptide exists as a hollow powder suspended in an aqueous, polar, non-polar, oil, wax, or surfactant diluent. This mixture can also include the presence of preservative and chelating agents.

[0043] The recombinant silk polypeptide can be included in the composition in an amount of about 0.01 wt % to about 30 wt % based on the total weight of the composition. For example, the recombinant silk polypeptide can be included in the composition, based on the total weight of the composition, in an amount of about 0.05 wt % to about 5 wt %, about 0.5 wt % to about 5 wt %, about 0.01 wt % to about 0.5 wt %, about 0.1 wt % to about 0.5 wt %, about 0.05 wt % to about 5 wt %, about 0.5 wt % to about 5 wt %, about 5 wt % to about 20 wt %, about 5 wt % to about 30 wt %, about 25 wt % to about 30 wt %, about 10 wt % to about 25 wt %, or about 1 wt % to about 5 wt %.

[0044] In some embodiments, the recombinant silk polypeptide forms a distinctive and detectable film on the skin and hair when applied within a leave-on formulation or wash-off formulation.

[0045] In some embodiments, the recombinant silk polypeptide helps to cleanse or exfoliate when applied within a wash-off formula.

[0046] In some embodiments, the recombinant silk polypeptide can be detected within a formulation (leave-on or wash-off) as evidenced by visual inspection with microscopy where a powder can be observed at 5-100× objective. Additionally the recombinant silk polypeptide can be detected by a high molecular weight peak between 50 kDa and 90 kDa using SEC-HPLC.

[0047] In some embodiments, the recombinant silk polypeptide matches silicone elastomer performance in skincare, haircare, cosmetic, personal care, antiperspirant/deodorant formulations at the same concentration or less.

[0048] In some embodiments, the recombinant silk polypeptide outperforms silicone elastomer performance in skincare, haircare, cosmetic, personal care, antiperspirant/deodorant formulations at the same concentration or less.

[0049] In some embodiments, the recombinant silk polypeptide replaces the silicone elastomer in at least a 1:1 ratio up to a 1:60 ratio, meaning 1 parts silicone elastomer can be replaced with 1 parts recombinant silk polypeptide up to 60 parts silicone elastomer can be replaced with 1 parts recombinant silk polypeptide. For example, a shampoo was produced having a silk polypeptide as a silicone replacement, with the silk polypeptide being present in an amount of 0.05 wt % based on the total weight of the compositions, whereas the same composition required a silicon elastomer in an amount of 3 wt % (a 60× increase) to achieve the same performance.

[0050] In some embodiments, the performance characteristics of the composition include one or more of
[0051] a) Silky, smooth, and powdery feel
[0052] b) Decrease in glossiness on the skin
[0053] c) Enhanced shine on the hair
[0054] d) Vibrant and efficient pigment delivery
[0055] e) Easy spreadability
[0056] f) Quick absorption time
[0057] g) Mattification (i.e., less greasy after feel)
[0058] h) Wrinkle blurring effect
[0059] i) Style retention and heat resistance for hair
[0060] j) UV and pollution defense
[0061] k) Increased formulation viscosity

[0062] In some embodiments, the recombinant silk polypeptide is compatible (meaning its structure and performance is maintained) with a wide variety of common cosmetic components such as polar and non-polar solvents, oils, waxes, fatty acids, humectants, and (sunscreen) actives.

[0063] Due to the difference in recombinant silk polypeptide swelling in different solvents, these differences can be used as formulation processing aids. For example, recombinant silk polypeptide can be added to a formulation in the unswelled state within an oil, wax, or non-polar solvent, and then upon coming in contact with water will swell. The recombinant silk polypeptide is fully or partially removed from skin and hair by water and fully removed by surfactants.

[0064] In some embodiments, the recombinant silk polypeptide outperforms silicone elastomers for biodegradation in both anaerobic and aerobic digestion conditions. Within an Organisation for Economic Co-operation and Development (OECD) 301 ready test the recombinant silk polypeptide will experience a rapid biodegradation during the first 3-5 days of at least 5-15%. During the subsequent 5-90 days of incubation, the recombinant silk polypeptide will experience constant increasing biodegradation with an absence of a plateau greater than 20 days. OECD (1992), Test No. 301: Ready Biodegradability, OECD Guidelines for the Testing of Chemicals, Section 3, OECD Publishing, Paris, doi.org/10.1787/9789264070349-en, incorporated herein by reference in its entirety.

### Definitions

[0065] The following terms, unless otherwise indicated, shall be understood to have the following meanings:

[0066] The term “stability”, as used herein with respect to silk proteins, refers to the ability of the product not to form a gelation, discoloration or turbidity that is due to the self-aggregation of silk proteins. For example, U.S. Patent Publication No. 2015/0079012 (Wray et al.) is directed to the use of humectant, including glycerol to increase the shelf-stability of skincare products comprising full-length silk fibroin. U.S. Pat. No. 9,187,538 is directed to a skincare formulation comprising full-length silk fibroin that is shelf stable for up to 10 days. Both of these publications are incorporated herein by reference in their entirety.

[0067] The term “polynucleotide” or “nucleic acid molecule” refers to a polymeric form of nucleotides of at least 10 bases in length. The term includes DNA molecules (e.g., cDNA or genomic or synthetic DNA) and RNA molecules (e.g., mRNA or synthetic RNA), as well as analogs of DNA or RNA containing non-natural nucleotide analogs, non-native internucleoside bonds, or both. The nucleic acid can be in any topological conformation. For instance, the nucleic acid can be single-stranded, double-stranded, triple-stranded, quadruplexed, partially double-stranded, branched, hairpinned, circular, or in a padlocked conformation.

[0068] Unless otherwise indicated, and as an example for all sequences described herein under the general format “SEQ ID NO:”, “nucleic acid comprising SEQ ID NO:1” refers to a nucleic acid, at least a portion of which has either (i) the sequence of SEQ ID NO: 1, or (ii) a sequence complementary to SEQ ID NO:1. The choice between the two is dictated by the context. For instance, if the nucleic acid is used as a probe, the choice between the two is dictated by the requirement that the probe be complementary to the desired target.

[0069] An “isolated” RNA, DNA or a mixed polymer is one which is substantially separated from other cellular components that naturally accompany the native polynucleotide in its natural host cell, e.g., ribosomes, polymerases and genomic sequences with which it is naturally associated.

[0070] An “isolated” organic molecule (e.g., a silk protein) is one which is substantially separated from the cellular components (membrane lipids, chromosomes, proteins) of the host cell from which it originated, or from the medium in which the host cell was cultured. The term does not require that the biomolecule has been separated from all other chemicals, although certain isolated biomolecules may be purified to near homogeneity.

[0071] The term “recombinant” refers to a biomolecule, e.g., a gene or protein, that (1) has been removed from its naturally occurring environment, (2) is not associated with all or a portion of a polynucleotide in which the gene is found in nature, (3) is operatively linked to a polynucleotide which it is not linked to in nature, or (4) does not occur in nature. The term “recombinant” can be used in reference to cloned DNA isolates, chemically synthesized polynucleotide analogs, or polynucleotide analogs that are biologically synthesized by heterologous systems, as well as proteins and/or mRNAs encoded by such nucleic acids.

[0072] An endogenous nucleic acid sequence in the genome of an organism (or the encoded protein product of that sequence) is deemed “recombinant” herein if a heterologous sequence is placed adjacent to the endogenous nucleic acid sequence, such that the expression of this endogenous nucleic acid sequence is altered. In this context, a heterologous sequence is a sequence that is not naturally adjacent to the endogenous nucleic acid sequence, whether or not the heterologous sequence is itself endogenous (originating from the same host cell or progeny thereof) or exogenous (originating from a different host cell or progeny thereof). By way of example, a promoter sequence can be substituted (e.g., by homologous recombination) for the native promoter of a gene in the genome of a host cell, such that this gene has an altered expression pattern. This gene would now become “recombinant” because it is separated from at least some of the sequences that naturally flank it.

[0073] A nucleic acid is also considered “recombinant” if it contains any modifications that do not naturally occur to the corresponding nucleic acid in a genome. For instance, an endogenous coding sequence is considered “recombinant” if it contains an insertion, deletion or a point mutation introduced artificially, e.g., by human intervention. A “recombinant nucleic acid” also includes a nucleic acid integrated into a host cell chromosome at a heterologous site and a nucleic acid construct present as an episome.

[0074] The term “peptide” as used herein refers to a short polypeptide, e.g., one that is typically less than about 50 amino acids long and more typically less than about 30 amino acids long. The term as used herein encompasses analogs and mimetics that mimic structural and thus biological function.

[0075] The term “polypeptide” encompasses both naturally occurring and non-naturally occurring proteins, and fragments, mutants, derivatives and analogs thereof. A polypeptide may be monomeric or polymeric. Further, a polypeptide may comprise a number of different domains each of which has one or more distinct activities.

[0076] The term “isolated protein” or “isolated polypeptide” is a protein or polypeptide that by virtue of its origin or source of derivation (1) is not associated with naturally associated components that accompany it in its native state, (2) exists in a purity not found in nature, where purity can be adjudged with respect to the presence of other cellular material (e.g., is free of other proteins from the same species) (3) is expressed by a cell from a different species, or (4) does not occur in nature (e.g., it is a fragment of a polypeptide found in nature or it includes amino acid analogs or derivatives not found in nature or linkages other than standard peptide bonds). Thus, a polypeptide that is chemically synthesized or synthesized in a cellular system different from the cell from which it naturally originates will be “isolated” from its naturally associated components. A polypeptide or protein may also be rendered substantially free of naturally associated components by isolation, using protein purification techniques well known in the art. As thus defined, “isolated” does not necessarily require that the protein, polypeptide, peptide or oligopeptide so described has been physically removed from its native environment.

[0077] The term “polypeptide fragment” refers to a polypeptide that has a deletion, e.g., an amino-terminal and/or carboxy-terminal deletion compared to a full-length polypeptide. In a preferred embodiment, the polypeptide fragment is a contiguous sequence in which the amino acid sequence of the fragment is identical to the corresponding positions in the naturally-occurring sequence. Fragments typically are at least 5, 6, 7, 8, 9 or 10 amino acids long, preferably at least 12, 14, 16 or 18 amino acids long, more preferably at least 20 amino acids long, more preferably at least 25, 30, 35, 40 or 45, amino acids, even more preferably at least 50 or 60 amino acids long, and even more preferably at least 70 amino acids long.

[0078] A protein has “homology” or is “homologous” to a second protein if the nucleic acid sequence that encodes the protein has a similar sequence to the nucleic acid sequence that encodes the second protein. Alternatively, a protein has homology to a second protein if the two proteins have “similar” amino acid sequences. (Thus, the term “homologous proteins” is defined to mean that the two proteins have similar amino acid sequences.) As used herein, homology between two regions of amino acid sequence (especially with respect to predicted structural similarities) is interpreted as implying similarity in function.

[0079] When “homologous” is used in reference to proteins or peptides, it is recognized that residue positions that are not identical often differ by conservative amino acid substitutions. A “conservative amino acid substitution” is one in which an amino acid residue is substituted by another amino acid residue having a side chain (R group) with similar chemical properties (e.g., charge or hydrophobicity). In general, a conservative amino acid substitution will not substantially change the functional properties of a protein. In cases where two or more amino acid sequences differ from each other by conservative substitutions, the percent sequence identity or degree of homology may be adjusted upwards to correct for the conservative nature of the substitution. Means for making this adjustment are well known to those of skill in the art. See, e.g., Pearson, 1994, Methods Mol. Biol. 24:307-31 and 25:365-89 (herein incorporated by reference).

[0080] The twenty conventional amino acids and their abbreviations follow conventional usage. See Immunology—A Synthesis (Golub and Gren eds., Sinauer Associates, Sunderland, Mass., 2^{nd} ed. 1991), which is incorporated herein by reference. Stereoisomers (e.g., D-amino acids) of the twenty conventional amino acids, unnatural amino acids such as α-, α-disubstituted amino acids, N-alkyl amino acids, and other unconventional amino acids may also be suitable components for polypeptides of the present invention. Examples of unconventional amino acids include: 4-hydroxyproline, γ-carboxyglutamate, ε-N,N,N-trimethyllysine, ε-N-acetyllysine, O-phosphoserine, N-acetylserine, N-formylmethionine, 3-methylhistidine, 5-hydroxylysine, N-methylarginine, and other similar amino acids and imino acids (e.g., 4-hydroxyproline). In the polypeptide notation used herein, the left-hand end corresponds to the amino terminal end and the right-hand end corresponds to the carboxy-terminal end, in accordance with standard usage and convention.

[0081] The following six groups each contain amino acids that are conservative substitutions for one another: 1) Serine(S), Threonine (T); 2) Aspartic Acid (D), Glutamic Acid (E); 3) Asparagine (N), Glutamine (Q); 4) Arginine (R), Lysine (K); 5) Isoleucine (I), Leucine (L), Methionine (M), Alanine (A), Valine (V), and 6) Phenylalanine (F), Tyrosine (Y), Tryptophan (W).

[0082] Sequence homology for polypeptides, which is sometimes also referred to as percent sequence identity, is typically measured using sequence analysis software. See, e.g., the Sequence Analysis Software Package of the Genetics Computer Group (GCG), University of Wisconsin Biotechnology Center, 910 University Avenue, Madison, Wis. 53705. Protein analysis software matches similar sequences using a measure of homology assigned to various substitutions, deletions and other modifications, including conservative amino acid substitutions. For instance, GCG contains programs such as “Gap” and “Bestfit” which can be used with default parameters to determine sequence homology or sequence identity between closely related polypeptides, such as homologous polypeptides from different species of organisms or between a wild-type protein and a mutein thereof. See, e.g., GCG Version 6.1.

[0083] A useful algorithm when comparing a particular polypeptide sequence to a database containing a large number of sequences from different organisms is the computer program BLAST (Altschul et al., J. Mol. Biol. 215:403-410 (1990); Gish and States, Nature Genet. 3:266-272 (1993); Madden et al., Meth. Enzymol. 266:131-141 (1996); Altschul et al., Nucleic Acids Res. 25:3389-3402 (1997); Zhang and Madden, Genome Res. 7:649-656 (1997)), especially blastp or tblastn (Altschul et al., Nucleic Acids Res. 25:3389-3402 (1997)).

[0084] Preferred parameters for BLASTp are: Expectation value: 10 (default); Filter: seg (default); Cost to open a gap: 11 (default); Cost to extend a gap: 1 (default); Max. alignments: 100 (default); Word size: 11 (default); No. of descriptions: 100 (default); Penalty Matrix: BLOWSUM62.

[0085] Preferred parameters for BLASTp are: Expectation value: 10 (default); Filter: seg (default); Cost to open a gap: 11 (default); Cost to extend a gap: 1 (default); Max. alignments: 100 (default); Word size: 11 (default); No. of descriptions: 100 (default); Penalty Matrix: BLOWSUM62. The length of polypeptide sequences compared for homology will generally be at least about 16 amino acid residues, usually at least about 20 residues, more usually at least about 24 residues, typically at least about 28 residues, and preferably more than about 35 residues. When searching a database containing sequences from a large number of different organisms, it is preferable to compare amino acid sequences. Database searching using amino acid sequences can be measured by algorithms other than blastp known in the art. For instance, polypeptide sequences can be compared using FASTA, a program in GCG Version 6.1. FASTA provides alignments and percent sequence identity of the regions of the best overlap between the query and search sequences. Pearson, Methods Enzymol. 183:63-98 (1990) (incorporated by reference herein). For example, percent sequence identity between amino acid sequences can be determined using FASTA with its default parameters (a word size of 2 and the PAM250 scoring matrix), as provided in GCG Version 6.1, herein incorporated by reference.

[0086] Throughout this specification and aspects, the word “comprise” or variations such as “comprises” or “comprising,” will be understood to imply the inclusion of a stated integer or group of integers but not the exclusion of any other integer or group of integers.

[0087] The term “glass transition” as used herein refers to the transition of a substance or composition from a hard, rigid or “glassy” state into a more pliable, “rubbery” or “viscous” state.

[0088] The term “glass transition temperature” as used herein refers to the temperature at which a substance or composition undergoes a glass transition.

[0089] The term “melt transition” as used herein refers to the transition of a substance or composition from a rubbery state to a less-ordered liquid phase.

[0090] The term “melting temperature” as used herein refers to the temperature range over which a substance undergoes a melt transition.

[0091] The term “plasticizer” as used herein refers to any molecule that interacts with a polypeptide sequence to prevent the polypeptide sequence from forming tertiary structures and bonds and/or increases the mobility of the polypeptide sequence.

[0092] The term “powder” as used herein refers to a composition that is present in granular form, which may or may not be complexed or agglomerated with a solvent such as water or serum. The term “dry powder” may be used interchangeably with the term “powder;” however, “dry powder” as used herein simply refers to the gross appearance of the granulated material and is not intended to mean that the material is completely free of complexed or agglomerated solvent unless otherwise indicated. Dry powder may be produced by spray-drying, lyophilization, and/or according to methods known in the art.

[0093] The term “carrier” refers to a recombinant protein used for surface hydration, surface cleansing, surface defense, surface detoxification, surface exfoliation, surface improvement, coloring, and/or delivery of various additives or solvents, including, but not limited to, water, glycerin, alcohols, siloxane, oils, humectants, emollients, occlusive agents, active agents, and/or cosmetic adjuvants to a surface like skin, hair, or nails. The carrier as used herein comprises an outer shell and hollow core, e.g., 18B protein.

[0094] The term “cosmetics” as used herein includes make-up, foundation, skin care, hair care, and nail care products.

[0095] The term “make-up” as used herein refers to products that leave color on the face, including foundation, blacks and browns, i.e., mascara, concealers, eye liners, brow colors, eye shadows, blushers, lip colors, powders, solid emulsion compact, and so forth.

[0096] The term “foundation” as used herein refers to liquid, cream, mousse, pancake, compact, concealer or like product created or reintroduced by cosmetic companies to even out the overall coloring of the skin.

[0097] The term “skin care products” as used herein refer to those used to treat or care for, or somehow moisturize, improve, or clean the skin. Products contemplated by the phrase “skin care products” include, but are not limited to, creams, mists, serums, cleansing gels, ampules, adhesives, patches, bandages, toothpaste, anhydrous occlusive moisturizers, antiperspirants, deodorants, personal cleansing products, powder laundry detergent, fabric softener towels, occlusive drug delivery patches, nail polish, powders, tissues, wipes, hair conditioners-anhydrous, shaving creams, and the like.

[0098] The term “sagging” as used herein means the laxity, slackness, or the like condition of skin that occurs as a result of loss of, damage to, alterations to, and/or abnormalities in dermal elastin, muscle and/or subcutaneous fat.

[0099] The terms “treating” or “treatment” as used herein refer to the treatment (e.g., alleviation or elimination of symptoms and/or cure) and/or prevention or inhibition of the condition (e.g., a skin condition) or relief of symptoms.

[0100] Exemplary methods and materials are described below, although methods and materials similar or equivalent to those described herein can also be used in the practice of the present invention and will be apparent to those of skill in the art. All publications and other references mentioned herein are incorporated by reference in their entirety. In case of conflict, the present specification, including definitions, will control. The materials, methods, and examples are illustrative only and not intended to be limiting.

### Recombinant Silk Proteins

[0101] The present disclosure describes embodiments of the invention including fibers synthesized from synthetic proteinaceous copolymers (i.e., recombinant polypeptides). Suitable proteinaceous co-polymers are discussed in U.S. Patent Publication No. 2016/0222174, published Aug. 45, 2016, U.S. Patent Publication No. 2018/0111970, published Apr. 26, 2018, and U.S. Patent Publication No. 2018/0057548, published Mar. 1, 2018, each of which are incorporated by reference herein in its entirety.

[0102] In some embodiments, the synthetic proteinaceous copolymers are made from silk-like polypeptide sequences. In some embodiments, the silk-like polypeptide sequences are 1) block copolymer polypeptide compositions generated by mixing and matching repeat domains derived from silk polypeptide sequences and/or 2) recombinant expression of block copolymer polypeptides having sufficiently large size (approximately 40 kDa) to form useful molded body compositions by secretion from an industrially scalable microorganism. Large (approximately 40 kDa to approximately 100 kDa) block copolymer polypeptides engineered from silk repeat domain fragments, including sequences from almost all published amino acid sequences of silk polypeptides, can be expressed in the modified microorganisms described herein. In some embodiments, silk polypeptide sequences are matched and designed to produce highly expressed and secreted polypeptides capable of molded body formation.

[0103] In some embodiments, block copolymers are engineered from a combinatorial mix of silk polypeptide domains across the silk polypeptide sequence space. In some embodiments, the block copolymers are made by expressing and secreting in scalable organisms (e.g., yeast, fungi, and gram positive bacteria). In some embodiments, the block copolymer polypeptide comprises 0 or more N-terminal domains (NTD), 1 or more repeat domains (REP), and 0 or more C-terminal domains (CTD). In some aspects of the embodiment, the block copolymer polypeptide is >100 amino acids of a single polypeptide chain. In some embodiments, the block copolymer polypeptide comprises a domain that is at least 80%, 81%, 82%, 83%, 84%, 85%, 86%, 87%, 88%, 89%, 90%, 91%, 92%, 93%, 94%, 95%, 96%, 97%, 98%, or 99% identical to a sequence of a block copolymer polypeptide as disclosed in International Publication No. WO/2015/042164, “Methods and Compositions for Synthesizing Improved Silk Fibers,” incorporated by reference in its entirety.

[0104] Several types of native spider silks have been identified. The mechanical properties of each natively spun silk type are believed to be closely connected to the molecular composition of that silk. See, e.g., Garb, J. E., et al., Untangling spider silk evolution with spidroin terminal domains, BMC Evol. Biol., 10:243 (2010); Bittencourt, D., et al., Protein families, natural history and biotechnological aspects of spider silk, Genet. Mol. Res., 11:3 (2012); Rising, A., et al., Spider silk proteins: recent advances in recombinant production, structure-function relationships and biomedical applications, Cell. Mol. Life Sci., 68:2, pg. 169-184 (2011); and Humenik, M., et al., Spider silk: understanding the structure-function relationship of a natural fiber, Prog. Mol. Biol. Transl. Sci., 103, pg. 131-85 (2011). For example:

[0105] Aciniform (AcSp) silks tend to have high toughness, a result of moderately high strength coupled with moderately high extensibility. AcSp silks are characterized by large block (“ensemble repeat”) sizes that often incorporate motifs of poly serine and GPX. Tubuliform (TuSp or Cylindrical) silks tend to have large diameters, with modest strength and high extensibility. TuSp silks are characterized by their poly serine and poly threonine content, and short tracts of poly alanine. Major Ampullate (MaSp) silks tend to have high strength and modest extensibility. MaSp silks can be one of two subtypes: MaSp1 and MaSp2. MaSp1 silks are generally less extensible than MaSp2 silks, and are characterized by poly alanine, GX, and GGX motifs. MaSp2 silks are characterized by poly alanine, GGX, and GPX motifs. Minor Ampullate (MiSp) silks tend to have modest strength and modest extensibility. MiSp silks are characterized by GGX, GA, and poly A motifs, and often contain spacer elements of approximately 100 amino acids. Flagelliform (Flag) silks tend to have very high extensibility and modest strength. Flag silks are usually characterized by GPG, GGX, and short spacer motifs.

[0106] The properties of each silk type can vary from species to species, and spiders leading distinct lifestyles (e.g. sedentary web spinners vs. vagabond hunters) or that are evolutionarily older may produce silks that differ in properties from the above descriptions (for descriptions of spider diversity and classification, see Hormiga, G., and Griswold, C. E., Systematics, phylogeny, and evolution of orb-weaving spiders, Annu. Rev. Entomol. 59, pg. 487-512 (2014); and Blackedge, T. A. et al., Reconstructing web evolution and spider diversification in the molecular era, Proc. Natl. Acad. Sci. U.S.A., 106:13, pg. 5229-5234 (2009)). However, synthetic block copolymer polypeptides having sequence similarity and/or amino acid composition similarity to the repeat domains of native silk proteins can be used to manufacture on commercial scales consistent molded bodies that have properties that recapitulate the properties of corresponding molded bodies made from natural silk polypeptides.

[0107] In some embodiments, a list of putative silk sequences can be compiled by searching GenBank for relevant terms, e.g. “spidroin” “fibroin” “MaSp”, and those sequences can be pooled with additional sequences obtained through independent sequencing efforts. Sequences are then translated into amino acids, filtered for duplicate entries, and manually split into domains (NTD, REP, CTD). In some embodiments, candidate amino acid sequences are reverse translated into a DNA sequence optimized for expression in Pichia (Komagataella) pastoris. The DNA sequences are each cloned into an expression vector and transformed into Pichia (Komagataella) pastoris. In some embodiments, various silk domains demonstrating successful expression and secretion are subsequently assembled in combinatorial fashion to build silk molecules capable of molded body formation.

[0108] Silk polypeptides are characteristically composed of a repeat domain (REP) flanked by non-repetitive regions (e.g., C-terminal and N-terminal domains). In an embodiment, both the C-terminal and N-terminal domains are between 75-350 amino acids in length. The repeat domain exhibits a hierarchical architecture. The repeat domain comprises a series of blocks (also called repeat units). The blocks are repeated, sometimes perfectly and sometimes imperfectly (making up a quasi-repeat domain), throughout the silk repeat domain. The length and composition of blocks varies among different silk types and across different species. Table 1A lists examples of block sequences from selected species and silk types, with further examples presented in Rising, A. et al., Spider silk proteins: recent advances in recombinant production, structure-function relationships and biomedical applications, Cell Mol. Life Sci., 68:2, pg 169-184 (2011); and Gatesy, J. et al., Extreme diversity, conservation, and convergence of spider silk fibroin sequences, Science, 291:5513, pg. 2603-2605 (2001). In some cases, blocks may be arranged in a regular pattern, forming larger macro-repeats that appear multiple times (usually 2-8) in the repeat domain of the silk sequence. Repeated blocks inside a repeat domain or macro-repeat, and repeated macro-repeats within the repeat domain, may be separated by spacing elements. In some embodiments, block sequences comprise a glycine rich region followed by a polyA region. In some embodiments, short (˜1-10) amino acid motifs appear multiple times inside of blocks. For the purpose of this invention, blocks from different natural silk polypeptides can be selected without reference to circular permutation (i.e., identified blocks that are otherwise similar between silk polypeptides may not align due to circular permutation). Thus, for example, a “block” of SGAGG (SEQ ID NO: 2871) is, for the purposes of the present invention, the same as GSGAG (SEQ ID NO: 2872) and the same as GGSGA (SEQ ID NO: 2873); they are all just circular permutations of each other. The particular permutation selected for a given silk sequence can be dictated by convenience (usually starting with a G) more than anything else. Silk sequences obtained from the NCBI database can be partitioned into blocks and non-repetitive regions.

TABLE 1A
Samples of Block Sequences

| Species | Silk Type | Representative Block Amino Acid Sequence |
|---|---|---|
| Aliatypus gulosus | Fibroin 1 | GAASSSSTIITTKSASASAAADASAAATASAASRSSANAAASAFAQS |
| | | FSSILLESGYFCSIFGSSISSSYAAAIASAASRAAAESNGYTTHAYA |
| | | CAKAVASAVERVTSGADAYAYAQAISDALSHALLYTGRLNTANANSL |
| | | ASAFAYAFANAAAQASASSASAGAASASGAASASGAGSAS(SEQ |
| | | ID NO: 2844) |
| Plectreurys tristis | Fibroin 1 | GAGAGAGAGAGAGAGAGSGASTSVSTSSSSGSGAGAGAGSGAGSGAG |
| | | AGSGAGAGAGAGGAGAGFGSGLGLGYGVGLSSAQAQAQAQAAAQAQA |
| | | QAQAQAYAAAQAQAQAQAQAQAAAAAAAAAAA (SEQ ID NO: |
| | | 2845) |
| Plectreurys tristis | Fibroin 4 | GAAQKQPSGESSVATASAAATSVTSGGAPVGKPGVPAPIFYPQGPLQ |
| | | QGPAPGPSNVQPGTSQQGPIGGVGGSNAFSSSFASALSLNRGFTEVI |
| | | SSASATAVASAFQKGLAPYGTAFALSAASAAADAYNSIGSGANAFAY |
| | | AQAFARVLYPLVQQYGLSSSAKASAFASAIASSESSGTSGQGPSIGQ |
| | | QQPPVTISAASASAGASAAAVGGGQVGQGPYGGQQQSTAASASAAAA |
| | | TATS(SEQ ID NO: 2846) |
| Araneus gemmoides | TuSp | GNVGYQLGLKVANSLGLGNAQALASSLSQAVSAVGVGASSNAYANAV |
| | | SNAVGQVLAGQGILNAANAGSLASSFASALSSSAASVASQSASQSQA |
| | | ASQSQAAASAFRQAASQSASQSDSRAGSQSSTKTTSTSTSGSQADSR |
| | | SASSSASQASASAFAQQSSASLSSSSSFSSAFSSATSISAV (SEQ |
| | | ID NO: 2847) |
| Argiope aurantia | TuSp | GSLASSFASALSASAASVASSAAAQAASQSQAAASAFSRAASQSASQ |
| | | SAARSGAQSISTTTTTSTAGSQAASQSASSAASQASASSFARASSAS |
| | | LAASSSESSAFSSANSLSALGNVGYQLGENVANNLGIGNAAGLGNAL |
| | | SQAVSSVGVGASSSTYANAVSNAVGQFLAGQGILNAANA (SEQ ID |
| | | NO: 2848) |
| Deinopis spinosa | TuSp | GASASAYASAISNAVGPYLYGLGLENQANAASFASSFASAVSSAVAS |
| | | ASASAASSAYAQSAAAQAQAASSAFSQAAAQSAAAASAGASAGAGAS |
| | | AGAGAVAGAGAVAGAGAVAGASAAAASQAAASSSASAVASAFAQSAS |
| | | YALASSSAFANAFASATSAGYLGSLAYQLGLTTAYNLGLSNAQAFAS |
| | | TLSQAVTGVGL (SEQ ID NO: 2849) |
| Nephila clavipes | TuSp | GATAASYGNALSTAAAQFFATAGLLNAGNASALASSFARAFSASAES |
| | | QSFAQSQAFQQASAFQQAASRSASQSAAEAGSTSSSTTTTTSAARSQ |
| | | AASQSASSSYSSAFAQAASSSLATSSALSRAFSSVSSASAASSLAYS |
| | | IGLSAARSLGIADAAGLAGVLARAAGALGQ (SEQ ID NO: |
| | | 2850) |
| Argiope trifasciata | Flag | GGAPGGGPGGAGPGGAGFGPGGGAGFGPGGGAGFGPGGAAGGPGGPG |
| | | GPGGPGGAGGYGPGGAGGYGPGGVGPGGAGGYGPGGAGGYGPGGSGP |
| | | GGAGPGGAGGEGPVTVDVDVTVGPEGVGGGPGGAGPGGAGFGPGGGA |
| | | GFGPGGAPGAPGGPGGPGGPGGPGGPGGVGPGGAGGYGPGGAGGVGP |
| | | AGTGGFGPGGAGGFGPGGAGGFGPGGAGGFGPAGAGGYGPGGVGPGG |
| | | AGGFGPGGVGPGGSGPGGAGGEGPVTVDVDVSV (SEQ ID NO: |
| | | 2851) |
| Nephila clavipes | Flag | GVSYGPGGAGGPYGPGGPYGPGGEGPGGAGGPYGPGGVGPGGSGPGG |
| | | YGPGGAGPGGYGPGGSGPGGYGPGGSGPGGYGPGGSGPGGYGPGGSG |
| | | PGGYGPGGYGPGGSGPGGSGPGGSGPGGYGPGGTGPGGSGPGGYGPG |
| | | GSGPGGSGPGGYGPGGSGPGGFGPGGSGPGGYGPGGSGPGGAGPGGV |
| | | GPGGFGPGGAGPGGAAPGGAGPGGAGPGGAGPGGAGPGGAGPGGAGP |
| | | GGAGGAGGAGGSGGAGGSGGTTIIEDLDITIDGADGPITISEELPIS |
| | | GAGGSGPGGAGPGGVGPGGSGPGGVGPGGSGPGGVGPGGSGPGGVGP |
| | | GGAGGPYGPGGSGPGGAGGAGGPGGAYGPGGSYGPGGSGGPGGAGGP |
| | | YGPGGEGPGGAGGPYGPGGAGGPYGPGGAGGPYGPGGEGGPYGP |
| | | (SEQ ID NO: 2852) |
| Latrodectus | AcSp | GINVDSDIGSVTSLILSGSTLQMTIPAGGDDLSGGYPGGFPAGAQPS |
| hesperus | | GGAPVDFGGPSAGGDVAAKLARSLASTLASSGVFRAAFNSRVSTPVA |
| | | VQLTDALVQKIASNLGLDYATASKLRKASQAVSKVRMGSDTNAYALA |
| | | ISSALAEVLSSSGKVADANINQIAPQLASGIVLGVSTTAPQFGVDLS |
| | | SINVNLDISNVARNMQASIQGGPAPITAEGPDFGAGYPGGAPTDLSG |
| | | LDMGAPSDGSRGGDATAKLLQALVPALLKSDVFRAIYKRGTRKQVVQ |
| | | YVTNSALQQAASSLGLDASTISQLQTKATQALSSVSADSDSTAYAKA |
| | | FGLAIAQVLGTSGQVNDANVNQIGAKLATGILRGSSAVAPRLGIDLS |
| | | (SEQ ID NO: 2853) |
| Argiope trifasciata | AcSp | GAGYTGPSGPSTGPSGYPGPLGGGAPFGQSGFGGSAGPQGGFGATGG |
| | | ASAGLISRVANALANTSTLRTVLRTGVSQQIASSVVQRAAQSLASTL |
| | | GVDGNNLARFAVQAVSRLPAGSDTSAYAQAFSSALFNAGVLNASNID |
| | | TLGSRVLSALLNGVSSAAQGLGINVDSGSVQSDISSSSSFLSTSSSS |
| | | ASYSQASASSTS(SEQ ID NO: 2854) |
| Uloborus diversus | AcSp | GASAADIATAIAASVATSLQSNGVLTASNVSQLSNQLASYVSSGLSS |
| | | TASSLGIQLGASLGAGFGASAGLSASTDISSSVEATSASTLSSSASS |
| | | TSVVSSINAQLVPALAQTAVLNAAFSNINTQNAIRIAELLTQQVGRQ |
| | | YGLSGSDVATASSQIRSALYSVQQGSASSAYVSAIVGPLITALSSRG |
| | | VVNASNSSQIASSLATAILQFTANVAPQFGISIPTSAVQSDLSTISQ |
| | | SLTAISSQTSSSVDSSTSAFGGISGPSGPSPYGPQPSGPTFGPGPSL |
| | | SGLTGFTATFASSFKSTLASSTQFQLIAQSNLDVQTRSSLISKVLIN |
| | | ALSSLGISASVASSIAASSSQSLLSVSA (SEQ ID NO: 2855) |
| Euprosthenops | MaSp1 | GGQGGQGQGRYGQGAGSSAAAAAAAAAAAAAA (SEQ ID NO: |
| australis | | 2856) |
| Tetragnatha | MaSp1 | GGLGGGQGAGQGGQQGAGQGGYGSGLGGAGQGASAAAAAAAA (SEQ |
| kauaiensis | | ID NO: 2857) |
| Argiope aurantia | MaSp2 | GGYGPGAGQQGPGSQGPGSGGQQGPGGLGPYGPSAAAAAAAA (SEQ |
| | | ID NO: 2858) |
| Deinopis spinosa | MaSp2 | GPGGYGGPGQQGPGQGQYGPGTGQQGQGPSGQQGPAGAAAAAAAAA |
| | | (SEQ ID NO: 2859) |
| Nephila clavata | MaSp2 | GPGGYGLGQQGPGQQGPGQQGPAGYGPSGLSGPGGAAAAAAA (SEQ |
| | | ID NO: 2860) |
| Deinopis Spinosa | MiSp | GAGYGAGAGAGGGAGAGTGYGGGAGYGTGSGAGYGAGVGYGAGAGA |
| | | GGGAGAGAGGGTGAGAGGGAGAGYGAGTGYGAGAGAGGGAGAGAGA |
| | | GAGAGAGAGSGAGAGYGAGAGYGAGAGAGGVAGAGAAGGAGAAGGA |
| | | GAAGGAGAAGGAGAGAGAGSGAGAGAGGGARAGAGG (SEQ ID |
| | | NO: 2861) |
| Latrodectus | MiSp | GGGYGRGQGAGAGVGAGAGAAAGAAAIARAGGYGQGAGGYGQGQGA |
| hesperus | | GAAAGAAAGAGAGGYGQGAGGYGRGQGAGAGAGAGAGARGYGQGAG |
| | | AGAAAGAAASAGAGGYGQGAGGYGQGQGAGAAAGAAASAGAGGYGQ |
| | | GAGGYGQGQGA (SEQ ID NO: 2862) |
| Nephila clavipes | MiSp | GAGAGGAGYGRGAGAGAGAAAGAGAGAAAGAGAGAGGYGGQGGYGA |
| | | GAGAGAAAAAGAGAGGAAGYSRGGRAGAAGAGAGAAAGAGAGAGGY |
| | | GGQGGYGAGAGAGAAAAAGAGSGGAGGYGRGAGAGAAAGAGAAAGA |
| | | GAGAGGYGGQGGYGAGAGAAAAA (SEQ ID NO: 2863) |
| Nephilengys | MiSp | GAGAGVGGAGGYGSGAGAGAGAGAGAASGAAAGAAAGAGAGGAGGY |
| cruentata | | GTGQGYGAGAGAGAGAGAGGAGGYGRGAGAGAGAGAGGAGGYGAGQ |
| | | GYGAGAGAGAAAAAGDGAGAGGAGGYGRGAGAGAGAGAAAGAGAGG |
| | | AGGYGAGQGYGAGAGAGAAAGAGAGGAGGYGAGQGYGAGAGAGAAA |
| | | AA (SEQ ID NO: 2864) |
| Uloborus diversus | MiSp | GSGAGAGSGYGAGAGAGAGSGYGAGSSASAGSAINTQTVTSSTTTS |
| | | SQSSAAATGAGYGTGAGTGASAGAAASGAGAGYGGQAGYGQGAGAS |
| | | ARAAGSGYGAGAGAAAAAGSGYGAGAGAGAGSGYGAGAAA (SEQ |
| | | ID NO: 2865) |
| Uloborus diversus | MiSp | GAGAGYRGQAGYIQGAGASAGAAAAGAGVGYGGQAGYGQGAGASAG |
| | | AAAAAGAGAGRQAGYGQGAGASAGAAAAGAGAGRQAGYGQGAGASA |
| | | GAAAAGADAGYGGQAGYGQGAGASAGAAASGAGAGYGGQAGYGQGA |
| | | GASAGAAAAGAGAGYLGQAGYGQGAGASAGAAAGAGAGYGGQAGYG |
| | | QGTGAAASAAASSA (SEQ ID NO: 2866) |
| Araneus | MaSp1 | GGQGGQGGYGGLGSQGAGQGGYGAGQGAAAAAAAAGGAGGAGRGGL |
| ventricosus | | GAGGAGQGYGAGLGGQGGAGQAAAAAAAGGAGGARQGGLGAGGAGQ |
| | | GYGAGLGGQGGAGQGGAAAAAAAAGGQGGQGGYGGLGSQGAGQGGY |
| | | GAGQGGAAAAAAAAGGQGGQGGYGGLGSQGAGQGGYGGRQGGAGAA |
| | | AAAAAA (SEQ ID NO: 2867) |
| Dolomedes | MaSp1 | GGAGAGQGSYGGQGGYGQGGAGAATATAAAAGGAGSGQGGYGGQGG |
| tenebrosus | | LGGYGQGAGAGAAAAAAAAAGGAGAGQGGYGGQGGQGGYGQGAGAG |
| | | AAAAAAGGAGAGQGGYGGQGGYGQGGGAGAAAAAAAASGGSGSGQG |
| | | GYGGQGGLGGYGQGAGAGAGAAASAAAA (SEQ ID NO: 2868) |
| Nephilengys | MaSp | GGAGQGGYGGLGGQGAGAAAAAAGGAGQGGYGGQGAGQGAAAAAAS |
| cruentata | | GAGQGGYEGPGAGQGAGAAAAAAGGAGQGGYGGLGGQGAGQGAGAA |
| | | AAAAGGAGQGGYGGLGGQGAGQGAGAAAAAAGGAGQGGYGGQGAGQ |
| | | GAAAAAAGGAGQGGYGGLGSGQGGYGRQGAGAAAAAAAA (SEQ |
| | | ID NO: 2869) |
| Nephilengys | MaSp | GGAGQGGYGGLGGQGAGAAAAAAGGAGQGGYGGQGAGQGAAAAAAS |
| cruentata | | GAGQGGYGGPGAGQGAGAAAAAAGGAGQGGYGGLGGQGAGQGAGAA |
| | | AAAAGGAGQGGYGGQGAGQGAAAAAAGGAGQGGYGGLGSGQGGYGG |
| | | QGAGAAAAAGGAGQGGYGGLGGQGAGQGAGAAAAAA (SEQ ID |
| | | NO: 2870) |

[0109] Fiber-forming block copolymer polypeptides from the blocks and/or macro-repeat domains, according to certain embodiments of the invention, is described in International Publication No. WO/2015/042164, incorporated by reference. Natural silk sequences obtained from a protein database such as GenBank or through de novo sequencing are broken up by domain (N-terminal domain, repeat domain, and C-terminal domain). The N-terminal domain and C-terminal domain sequences selected for the purpose of synthesis and assembly into fibers or molded bodies include natural amino acid sequence information and other modifications described herein. The repeat domain is decomposed into repeat sequences containing representative blocks, usually 1-8 depending upon the type of silk, that capture critical amino acid information while reducing the size of the DNA encoding the amino acids into a readily synthesizable fragment. In some embodiments, a properly formed block copolymer polypeptide comprises at least one repeat domain comprising at least 1 repeat sequence, and is optionally flanked by an N-terminal domain and/or a C-terminal domain.

[0110] In some embodiments, a repeat domain comprises at least one repeat sequence. In some embodiments, the repeat sequence is 150-300 amino acid residues. In some embodiments, the repeat sequence comprises a plurality of blocks. In some embodiments, the repeat sequence comprises a plurality of macro-repeats. In some embodiments, a block or a macro-repeat is split across multiple repeat sequences.

[0111] In some embodiments, the repeat sequence starts with a glycine, and cannot end with phenylalanine (F), tyrosine (Y), tryptophan (W), cysteine (C), histidine (H), asparagine (N), methionine (M), or aspartic acid (D) to satisfy DNA assembly requirements. In some embodiments, some of the repeat sequences can be altered as compared to native sequences. In some embodiments, the repeat sequences can be altered such as by addition of a serine to the C terminus of the polypeptide (to avoid terminating in F, Y, W, C, H, N, M, or D). In some embodiments, the repeat sequence can be modified by filling in an incomplete block with homologous sequence from another block. In some embodiments, the repeat sequence can be modified by rearranging the order of blocks or macrorepeats.

[0112] In some embodiments, non-repetitive N- and C-terminal domains can be selected for synthesis. In some embodiments, N-terminal domains can be by removal of the leading signal sequence, e.g., as identified by SignalP (Peterson, T. N., et. Al., SignalP 4.0: discriminating signal peptides from transmembrane regions, Nat. Methods, 8:10, pg. 785-786 (2011).

[0113] In some embodiments, the N-terminal domain, repeat sequence, or C-terminal domain sequences can be derived from Agelenopsis aperta, Aliatypus gulosus, Aphonopelma seemanni, Aptostichus sp. AS217, Aptostichus sp. AS220, Araneus diadematus, Araneus gemmoides, Araneus ventricosus, Argiope amoena, Argiope argentata, Argiope bruennichi, Argiope trifasciata, Atypoides riversi, Avicularia juruensis, Bothriocyrtum californicum, Deinopis Spinosa, Diguetia canities, Dolomedes tenebrosus, Euagrus chisoseus, Euprosthenops australis, Gasteracantha mammosa, Hypochilus thorelli, Kukulcania hibernalis, Latrodectus hesperus, Megahexura fulva, Metepeira grandiosa, Nephila antipodiana, Nephila clavata, Nephila clavipes, Nephila madagascariensis, Nephila pilipes, Nephilengys cruentata, Parawixia bistriata, Peucetia viridans, Plectreurys tristis, Poecilotheria regalis, Tetragnatha kauaiensis, or Uloborus diversus.

[0114] In some embodiments, the silk polypeptide nucleotide coding sequence can be operatively linked to an alpha mating factor nucleotide coding sequence. In some embodiments, the silk polypeptide nucleotide coding sequence can be operatively linked to another endogenous or heterologous secretion signal coding sequence. In some embodiments, the silk polypeptide nucleotide coding sequence can be operatively linked to a 3×FLAG nucleotide coding sequence. In some embodiments, the silk polypeptide nucleotide coding sequence is operatively linked to other affinity tags such as 6-8 His residues.

[0115] In some embodiments, the recombinant silk polypeptides are based on recombinant spider silk protein fragment sequences derived from MaSp2, such as from the species Argiope bruennichi. In some embodiments, the synthesized fiber contains protein molecules that include two to twenty repeat units, in which a molecular weight of each repeat unit is greater than about 20 kDa. Within each repeat unit of the copolymer are more than about 60 amino acid residues, often in the range 60 to 100 amino acids that are organized into a number of “quasi-repeat units.” In some embodiments, the repeat unit of a polypeptide described in this disclosure has at least 95% sequence identity to a MaSp2 dragline silk protein sequence.

[0116] The repeat unit of the proteinaceous block copolymer that forms fibers with good mechanical properties can be synthesized using a portion of a silk polypeptide. These polypeptide repeat units contain alanine-rich regions and glycine-rich regions, and are 150 amino acids in length or longer. Some exemplary sequences that can be used as repeats in the proteinaceous block copolymers of this disclosure are provided in in co-owned PCT Publication WO 2015/042164, incorporated by reference in its entirety, and were demonstrated to express using a Pichia expression system.

[0117] In some embodiments, the silk protein comprises: at least two occurrences of a repeat unit, the repeat unit comprising: more than 150 amino acid residues and having a molecular weight of at least 10 kDa; an alanine-rich region with 6 or more consecutive amino acids, comprising an alanine content of at least 80%; a glycine-rich region with 12 or more consecutive amino acids, comprising a glycine content of at least 40% and an alanine content of less than 30%; and wherein the fiber comprises at least one property selected from the group consisting of a modulus of elasticity greater than 550 cN/tex, an extensibility of at least 10% and an ultimate tensile strength of at least 15 cN/tex.

[0118] In some embodiments, wherein the recombinant silk protein comprises repeat units wherein each repeat unit has at least 95% sequence identity to a sequence that comprises from 2 to 20 quasi-repeat units; each quasi-repeat unit comprises {GGY-[GPG-X₁]ₙ₁-GPS-(A)ₙ₂}, wherein for each quasi-repeat unit; X₁ is independently selected from the group consisting of SGGQQ (SEQ ID NO: 2874), GAGQQ (SEQ ID NO: 2875), GQGOPY (SEQ ID NO: 2876), AGQQ (SEQ ID NO: 2877), and SQ; and n1 is from 4 to 8, and n2 is from 6-10. The repeat unit is composed of multiple quasi-repeat units.

[0119] In some embodiments, 3 “long” quasi repeats are followed by 3 “short” quasi-repeat units. As mentioned above, short quasi-repeat units are those in which n1=4 or 5. Long quasi-repeat units are defined as those in which n1=6, 7 or 8. In some embodiments, all of the short quasi-repeats have the same X₁ motifs in the same positions within each quasi-repeat unit of a repeat unit. In some embodiments, no more than 3 quasi-repeat units out of 6 share the same X₁ motifs.

[0120] In additional embodiments, a repeat unit is composed of quasi-repeat units that do not use the same X₁ more than two occurrences in a row within a repeat unit. In additional embodiments, a repeat unit is composed of quasi-repeat units where at least 1, 2, 3, 4, 5, 6, 7, 8, 9, 10, 11, 12, 13, 14, 15, 16, 17, 18, 19 or 20 of the quasi-repeats do not use the same X₁ more than 2 times in a single quasi-repeat unit of the repeat unit.

[0121] In some embodiments, the recombinant silk polypeptide comprises the polypeptide sequence of SEQ ID NO: 2878 (i.e., 18B). In some embodiments, the repeat unit is a polypeptide comprising SEQ ID NO: 2879. These sequences are provided in Table 1B:

TABLE 1B
Exemplary polypeptides sequences of recombinant protein and repeat unit

| SEQ ID | Polypeptide Sequence |
|---|---|
| SEQ ID NO: 2878 | GGYGPGAGQQGPGSGGQQGPGGQGPYGSGQQGPGGAGQQGPGGQGPYGPGAAAAAAAAAG |
| | GYGPGAGQQGPGGAGQQGPGSQGPGGQGPYGPGAGQQGPGSQGPGSGGQQGPGGQGPYGP |
| | SAAAAAAAAAGGYGPGAGQRSQGPGGQGPYGPGAGQQGPGSQGPGSGGQQGPGGQGPYGP |
| | SAAAAAAAAGGYGPGAGQQGPGSQGPGSGGQQGPGGQGPYGPGAAAAAAAVGGYGPGAGQ |
| | QGPGSQGPGSGGQQGPGGQGPYGPSAAAAAAAAGGYGPGAGQQGPGSQGPGSGGQQGPGG |
| | QGPYGPSAAAAAAAAGGYGPGAGQQGPGSGGQQGPGGQGPYGSGQQGPGGAGQQGPGGQG |
| | PYGPGAAAAAAAAAGGYGPGAGQQGPGGAGQQGPGSQGPGGQGPYGPGAGQQGPGSQGPG |
| | SGGQQGPGGQGPYGPSAAAAAAAAAGGYGPGAGQRSQGPGGQGPYGPGAGQQGPGSQGPG |
| | SGGQQGPGGQGPYGPSAAAAAAAAGGYGPGAGQQGPGSQGPGSGGQQGPGGQGPYGPGAA |
| | AAAAAVGGYGPGAGQQGPGSQGPGSGGQQGPGGQGPYGPSAAAAAAAAGGYGPGAGQQGP |
| | GSQGPGSGGQQGPGGQGPYGPSAAAAAAAAGGYGPGAGQQGPGSGGQQGPGGQGPYGSGQ |
| | QGPGGAGQQGPGGQGPYGPGAAAAAAAAAGGYGPGAGQQGPGGAGQQGPGSQGPGGQGPY |
| | GPGAGQQGPGSQGPGSGGQQGPGGQGPYGPSAAAAAAAAAGGYGPGAGQRSQGPGGQGPY |
| | GPGAGQQGPGSQGPGSGGQQGPGGQGPYGPSAAAAAAAAGGYGPGAGQQGPGSQGPGSGG |
| | QQGPGGQGPYGPGAAAAAAAVGGYGPGAGQQGPGSQGPGSGGQQGPGGQGPYGPSAAAAA |
| | AAAGGYGPGAGQQGPGSQGPGSGGQQGPGGQGPYGPSAAAAAAAA |
| SEQ ID NO: 2879 | GGYGPGAGQQGPGSGGQQGPGGQGPYGSGQQGPGGAGQQGPGGQGPYGPGAAAAAAAAAG |
| | GYGPGAGQQGPGGAGQQGPGSQGPGGQGPYGPGAGQQGPGSQGPGSGGQQGPGGQGPYGP |
| | SAAAAAAAAAGGYGPGAGQRSQGPGGQGPYGPGAGQQGPGSQGPGSGGQQGPGGQGPYGP |
| | SAAAAAAAAGGYGPGAGQQGPGSQGPGSGGQQGPGGQGPYGPGAAAAAAAVGGYGPGAGQ |
| | QGPGSQGPGSGGQQGPGGQGPYGPSAAAAAAAAGGYGPGAGQQGPGSQGPGSGGQQGPGG |
| | QGPYGPSAAAAAAAA |

[0122] In some embodiments, the structure of fibers formed from the described recombinant silk polypeptides form beta-sheet structures, beta-turn structures, or alpha-helix structures. In some embodiments, the secondary, tertiary and quaternary protein structures of the formed fibers are described as having nanocrystalline beta-sheet regions, amorphous beta-turn regions, amorphous alpha helix regions, randomly spatially distributed nanocrystalline regions embedded in a non-crystalline matrix, or randomly oriented nanocrystalline regions embedded in a non-crystalline matrix. Without intending to be limited by theory, the structural properties of the proteins within the spider silk are theorized to be related to fiber mechanical properties. Crystalline regions in a fiber have been linked with the tensile strength of a fiber, while the amorphous regions have been linked to the extensibility of a fiber. The major ampullate (MA) silks tend to have higher strengths and less extensibility than the flagelliform silks, and likewise the MA silks have higher volume fraction of crystalline regions compared with flagelliform silks. Furthermore, theoretical models based on the molecular dynamics of crystalline and amorphous regions of spider silk proteins, support the assertion that the crystalline regions have been linked with the tensile strength of a fiber, while the amorphous regions have been linked to the extensibility of a fiber. Additionally, the theoretical modeling supports the importance of the secondary, tertiary and quaternary structure on the mechanical properties of recombinant protein fibers (RPFs). For instance, both the assembly of nano-crystal domains in a random, parallel and serial spatial distributions, and the strength of the interaction forces between entangled chains within the amorphous regions, and between the amorphous regions and the nano-crystalline regions, influenced the theoretical mechanical properties of the resulting fibers.

[0123] In some embodiments, the molecular weight of the silk protein may range from 20 kDa to 2000 kDa, or greater than 20 kDa, or greater than 10 kDa, or greater than 5 kDa, or from 5 to 400 kDa, or from 5 to 300 kDa, or from 5 to 200 kDa, or from 5 to 100 kDa, or from 5 to 50 kDa, or from 5 to 500 kDa, or from 5 to 1000 kDa, or from 5 to 2000 kDa, or from 10 to 400 kDa, or from 10 to 300 kDa, or from 10 to 200 kDa, or from 10 to 100 kDa, or from 10 to 50 kDa, or from 10 to 500 kDa, or from 10 to 1000 kDa, or from 10 to 2000 kDa, or from 20 to 400 kDa, or from 20 to 300 kDa, or from 20 to 200 kDa, or from 40 to 300 kDa, or from 40 to 500 kDa, or from 20 to 100 kDa, or from 20 to 50 kDa, or from 20 to 500 kDa, or from 20 to 1000 kDa, or from 20 to 2000 kDa.

### Characterization of Recombinant Spider Silk Polypeptide Powder Impurities and Degradation

[0124] Different recombinant spider silk polypeptides have different physiochemical properties such as melting temperature and glass transition temperature based on the strength and stability of the secondary and tertiary structures formed by the proteins. Silk polypeptides form beta sheet structures in a monomeric form. In the presence of other monomers, the silk polypeptides form a three-dimensional crystalline lattice of beta sheet structures. The beta sheet structures are separated from, and interspersed with, amorphous regions of polypeptide sequences.

[0125] Beta sheet structures are extremely stable at high temperatures—the melting temperature of beta-sheets is approximately 257° C. as measured by fast scanning calorimetry. See Cebe et al., Beating the Heat—Fast Scanning Melts Silk Beta Sheet Crystals, Nature Scientific Reports 3:1130 (2013). As beta sheet structures are thought to stay intact above the glass transition temperature of silk polypeptides, it has been postulated that the structural transitions seen at the glass transition temperature of recombinant silk polypeptides are due to increased mobility of the amorphous regions between the beta sheets.

[0126] Plasticizers lower the glass transition temperature and the melting temperature of silk proteins by increasing the mobility of the amorphous regions and potentially disrupting beta sheet formation. Suitable plasticizers used for this purpose include, but are not limited to, water and polyalcohols (polyols) such as glycerol, triglycerol, hexaglycerol, and decaglycerol. Other suitable plasticizers include, but are not limited to, Dimethyl Isosorbite; adiptic acid; amide of dimethylaminopropyl amine and caprylic/capric acid; acetamide; and any combination thereof.

[0127] As hydrophilic portions of silk polypeptides can bind ambient water present in the air as humidity, water will almost always be present, the bound ambient water may plasticize silk polypeptides. In some embodiments, a suitable plasticizer may be glycerol, present either alone or in combination with water or other plasticizers. Other suitable plasticizers are discussed above.

[0128] In addition, in instances where recombinant silk polypeptides are produced by fermentation and recovered as recombinant silk polypeptide powder from the same, there may be impurities present in the recombinant silk polypeptide powder that act as plasticizers or otherwise inhibit the formation of tertiary structures. For example, residual lipids and sugars may act as plasticizers and thus influence the glass transition temperature of the protein by interfering with the formation of tertiary structures.

[0129] Various well-established methods may be used to assess the purity and relative composition of recombinant silk polypeptide powder or composition. Size Exclusion Chromatography separates molecules based on their relative size and can be used to analyze the relative amounts of recombinant silk polypeptide in its full-length polymeric and monomeric forms as well as the amount of high, low and intermediate molecular weight impurities in the recombinant silk polypeptide powder. Similarly, Rapid High Performance Liquid Chromatography may be used to measure various compounds present in a solution such as monomeric forms of the recombinant silk polypeptide. Ion Exchange Liquid Chromatography may be used to assess the concentrations of various trace molecules in solution, including impurities such as lipids and sugars. Other methods of chromatography and quantification of various molecules such as mass spectrometry are well established in the art.

[0130] Depending on the embodiment, the recombinant silk polypeptide may have a purity calculated based on the amount of the recombinant silk polypeptide in its monomeric form by weight relative to the other components of the recombinant silk polypeptide powder. In various instances, the purity can range from 50% by weight to 90% by weight, depending on the type of recombinant silk polypeptide and the techniques used to recover, separate and post-process the recombinant silk polypeptide powder.

[0131] Both Size Exclusion Chromatography and Reverse Phase High Performance Liquid Chromatography are useful in measuring full-length recombinant silk polypeptide, which makes them useful techniques for determining whether processing steps have degraded the recombinant silk polypeptide by comparing the amount of full-length silk polypeptide in a composition before and after processing. In various embodiments of the present invention, the amount of full-length recombinant silk polypeptide present in a composition before and after processing may be subject to minimal degradation. The amount of degradation may be in the range 0.001% by weight to 10% by weight, or 0.01% by weight to 6% by weight, e.g. less than 10% or 8% or 6% by weight, or less than 5% by weight, less than 3% by weight or less than 1% by weight.

### Silicone Replacement Component

[0132] The silicone replacement component includes the recombinant silk polypeptide. The silicone replacement component can consists of the recombinant silk polypeptide. The silicone replacement component can include the recombinant silk polypeptide with a solvent and/or one or more additives, such as preservatives and chelating agents. The silicone replacement component can include the recombinant silk polypeptide in an amount, based on the total weight of the silicone replacement component, of about 1 wt % to about 40 wt % or in any other suitable amount needed to achieve a final desired loading the recombinant silk polypeptide in the cosmetic, skin or hair care composition.

[0133] Without intending to be limited by theory, in various embodiments of the present invention, inducing the silicone replacement Component may be used in applications where it is desirable to prevent the aggregation of the monomeric recombinant silk polypeptide into its crystalline polymeric form or to control the transition of the recombinant silk polypeptide into its crystalline polymeric form at a later stage in processing. In other embodiments, such inducing is not required.

[0134] In one specific embodiment, the silicon elastomer replacement component may be used to prevent aggregation of the recombinant silk polypeptide prior to blending the recombinant silk polypeptide with a second polymer. In another specific embodiment, the silicon elastomer replacement component may be used to create a base for a cosmetic or skincare product where the recombinant silk polypeptide is present in the base in its monomeric form. In this embodiment, having the recombinant silk polypeptide in its monomeric form in a base allows for the controlled aggregation of the monomer into its crystalline polymeric form upon contact with skin or through various other chemical reactions.

[0135] In various embodiments, the temperature to which the silicon elastomer replacement component having the recombinant silk polypeptide is heated will be minimized in order to minimize or entirely prevent degradation of the recombinant silk polypeptide. In specific embodiments, the recombinant silk melt will be heated to a temperature of less than 120° C., less than 100° C., less than 80° C., less than 60° C., less than 40° C., or less than 20° C. Often the melt will be at a temperature in the range 10° C. to 120° C., 10° C. to 100° C., 15° C. to 80° C., 15° C. to 60° C., 18° C. to 40° C. or 18° C. to 22° C. during processing. In other embodiments, the silicon elastomer replacement component is not heated. In such embodiments, the presence of heat is not required to form a silicon elastomer replacement component.

[0136] The amount of degradation of the recombinant silk polypeptide may be measured using various techniques. As discussed above, the amount of degradation of the recombinant silk polypeptide may be measured using Size Exclusion Chromatography to measure the amount of full-length recombinant silk polypeptide present. In various embodiments, the recombinant silk polypeptide is degraded in an amount of less than 6.0 weight % after it is formed into a molded body. In another embodiment, the recombinant silk polypeptide is degraded in an amount of less than 4.0 weight % after molding, less than 3.0 weight %, less than 2.0 weight %, or less than 1.0 weight %, such that the amount of degradation may be in the range 0.001% by weight to 10%, 8%, 6%, 4%, 3%, 2% or 1% by weight, or 0.01% by weight to 6%, 4%, 3%, 2% or 1% by weight. In another embodiment, the recombinant silk protein in the composition is substantially non-degraded. In a similar embodiment, the recombinant silk protein in the composition is substantially non-degraded over a period of time, at least 1 day, 1 month, 1 year, or 5 years.

[0137] In some embodiments, the silicone replacement component is physically stable. In various embodiments, the component remains in its material form, e.g., a powder, for a prolonged period of time, with a prolonged shelf life. On prolonged use, the silicone replacement component remains substantially stable. In some embodiments, the silicone replacement component has stability substantially the same as the stability of a silicone and/or silicone elastomer.

[0138] In some embodiments, the silicone replacement component has material properties substantially similar to the material properties of a silicone and/or silicone elastomer. In various embodiments, the silicone replacement component has substantially similar rheology as a silicone and/or silicone elastomer and/or imparts to a composition of the disclosure similar rheology as inclusion of a silicone and/or silicone elastomer.

[0139] In most embodiments of the present invention, the silicone replacement component is in a powder form. The silicone replacement component can include the recombinant silk polypeptide in a powder. In some embodiments, the silicone replacement component is spray-dried. In other embodiments, the silicone replacement component is freeze-dried or vacuum-dried. The terms “spray-drying” and “spray-dried” are used herein for simplicity but the skilled person will appreciate that freeze-drying or lyophilization and vacuum drying can be substituted for spray-drying as appropriate. These silicone replacement components may be stored dry.

[0140] The 18B protein is more stable in a dried form than in an aqueous slurry. In some embodiments, spray-dried recombinant silk is obtained as follows: a slurry composition comprising extracted recombinant silk is kept chilled during the drying step. It is pumped to a tall form spray dryer where the moisture content of the resulting powder is tightly controlled. As the protein powder is hydroscopic, the final powder collection and packout is performed to minimize reintroduction of moisture. The design of the packaging material should minimize moisture and light exposure.

[0141] In some embodiments, recovery and separation of the recombinant silk polypeptide from a cell culture is performed as follows: i) extraction and separation, ii) urea removal by ultrafiltration, iii) washing by precipitation, iv) salt removal and protein concentration, and v) spray drying.

[0142] In some embodiments, to freeze-dry a composition it is cooled until it solidifies and placed under reduced pressure to cause the most volatile ingredients in the composition to sublime. The solid residue may form a single mass which requires milling to form a fine powder. A typical freeze-dried powder comprises porous irregular shaped particles and readily hydrates. As freeze-drying does not require strong heat it is used to produce powders which comprise volatile ingredients. In some embodiments, the silicone replacement component is deep freeze-dried at a temperature below about −100° C.

[0143] After formation of the silicone replacement component, the crystallinity of the silicone replacement component can increase, thereby strengthening the composition. In some embodiments, the silicone replacement component stays the same or decreases. In some embodiments, the crystallinity index of the silicone replacement component as measured by X-ray crystallography is from 2% to 90%. In some other embodiments, the crystallinity index of the silicone replacement component as measured by X-ray crystallography is at least 3%, at least 4%, at least 5%, at least 6%, or at least 7%.

[0144] In some embodiments of the present invention, the silicone replacement component is a solid or film. In some embodiments, the silicone replacement component is a powder. In some embodiments, the solid or film will be substantially homogeneous meaning that the material, as inspected by light microscopy, has a low amount or does not have any inclusions or precipitates. In some embodiments, light microscopy may be used to measure birefringence which can be used as a proxy for alignment of the recombinant silk into a three-dimensional lattice. Birefringence is the optical property of a material having a refractive index that depends on the polarization and propagation of light. Specifically, a high degree of axial order as measured by birefringence can be linked to high tensile strength. In some embodiments, recombinant silk solids and films will have minimal birefringence. In various embodiments, the solid is a bead. In some other embodiments, the solid functions as an exfoliant. The recombinant silk solid may be in the form of a gentle skin scrub for the skin. In some embodiments, the material form is a roll, pellet, sheet, or flake.

[0145] In some embodiments, the recombinant silk protein comprises a hollow core and/or a shell. In some embodiments, the recombinant silk protein ranges from about 1 μm to about 30 μm in diameter, about 5 μm to about 20 μm, or about 10 μm to about 50 μm in diameter, while recombinant silk protein in water ranges from about 20 to about 80 μm in diameter, about 30 μm to about 70 μm, or about 40 μm to about 100 μm in diameter. Prior to incorporate into the compositions of the disclosure, the recombinant silk protein hollow powder can be milled and incorporated as a milled powder.

### Solvents

[0146] In some embodiments, the silicone replacement component can include one or more solvents. For example, the recombinant silk polypeptide can be suspended in a solvent. The solvent can be an aqueous solvent, an alcohol, or an oil-based solvent. For example, the solvent can be one or more of water, glycerin, deionized water, olive oil, and pentylene glycol. For example, the recombinant silk polypeptide can be treated with a solvent such that the hollow core contains the solvent such as liquid water or glycerin, either in form of liquid water itself, or as a liquid aqueous solution, as an emulsion containing liquid water, or as an aqueous dispersion. In some embodiments, the silicone replacement component comprises about a 25 wt % solution in glycerin.

[0147] In some embodiments, the solvent is water. Without intending to be limited by theory, subjecting the recombinant silk polypeptide to a solvent such as water results in a recombinant silk polypeptide that has expanded or swelled, wherein the protein functions as a carrier containing the solvent (e.g., water). These compositions can be stored dry and partially rehydratable after immersion in water to directly form a liquid or semi-liquid aqueous suspension of expanded particles.

[0148] In some embodiments, the recombinant silk protein may expand a portion of the hollow core. In some other embodiments, the recombinant silk protein may expand a portion of the shell. In such embodiments where the solvent is water, the recombinant silk protein transforms into a hydrogel. In other embodiments where the solvent is water, the recombinant silk protein transforms into a paste. In various embodiments, heat and/or pressure may be added to further process the recombinant silk protein compositions.

[0149] In some embodiments, a solvent is generally present in a proportion ranging from 55 to 90% by weight relative to the total weight of the recombinant silk polypeptide. This range includes all specific values and subranges there between, including 60%, 65%, 70%, 75%, 80%, and 85% by weight. In some embodiments, the recombinant silk protein is insoluble in various solvents, including water at various different pH levels, glycerin, alcohols, siloxane, and oils.

[0150] In some embodiments, the solvent is an aqueous type. In such embodiments, the solvent is water. The solvent may have a pH ranging from 6 to 12. In some embodiments, the solvent has a pH of 6. In some other embodiments, the solvent has a pH ranging from 0 to 5, from 2 to 7, from 4 to 9, from 6 to 11, from 8 to 13, or from 10 to 14.

[0151] In other embodiments, the solvent includes a mixture of various volatile organic solvents, in order to obtain relatively short drying times. In some embodiments, the solvent is an alcohol.

[0152] Solvents may include water, ethyl alcohol, toluene, methylene chloride, isopropanol, n-butyl alcohol, castor oil, organopolysiloxane oils, ethylene glycol monoethyl ether, diethylene glycol monobutyl ether, diethylene glycol monoethyl ether, dimethyl sulphoxide, dimethyl formamide and tetrahydrofuran.

[0153] In some embodiments, the organopolysiloxane oil may be volatile, non-volatile, or a mixture of volatile and non-volatile silicones. The term “non-volatile” as used in this context refers to those silicones that are liquid under ambient conditions and have a flash point (under one atmospheric of pressure) of or greater than about 100° C. The term “volatile” as used in this context refers to all other silicone oils. Suitable organopolysiloxanes can be selected from a wide variety of silicones spanning a broad range of volatilities and viscosities. Suitable silicones are disclosed in U.S. Pat. No. 5,069,897, issued Dec. 3, 1991, which is incorporated by reference herein in its entirety. Examples of suitable organopolysiloxanes include, but are not limited to, polyalkylsiloxanes, alkyl substituted dimethicones, dimethiconols, polyalkylaryl siloxanes, and mixtures thereof. For instance, polyalkylsiloxanes, dimethicones and cyclomethicones may be used.

[0154] In some embodiments, the solvent is a vegetable oil and hydrogenated vegetable oil. In some embodiments, the solvent is a free fatty acid. Examples of vegetable oils and hydrogenated vegetable oils include safflower oil, castor oil, coconut oil, cottonseed oil, menhaden oil, palm kernel oil, palm oil, peanut oil, soybean oil, rapeseed oil, linseed oil, rice bran oil, pine oil, sesame oil, sunflower seed oil, partially and fully hydrogenated oils from the foregoing sources, and mixtures thereof. Animal fats and oils, e.g., cod liver oil, lanolin and derivatives thereof such as acetylated lanolin and isopropyl lanolate, may be used. Also useful are C₄-C₂₀ alkyl ethers of polypropylene glycols, C₁-C₂₀ carboxylic acid esters of polypropylene glycols, and di-C₈-C₃₀ alkyl ethers, examples of which include PPG-14 butyl ether, PPG-15 stearyl ether, dioctyl ether, dodecyl octyl ether, and mixtures thereof.

[0155] The compositions of the present invention may be substantially free of semi-solid hydrocarbons such as petrolatum, lanolin and lanolin derivatives, sterols (e.g., ethoxylated soya sterols), high molecular weight polybutenes and cocoa butter. By “substantially free,” as used herein, means that the concentration of the semi-solid hydrocarbons is less than 10%, or less than 5% or less than 2% or 0%.

### Recombinant Silk Proteins as a Cosmetics Formulation

[0156] In various embodiments, the recombinant silk protein is compounded into a silk cosmetic or skincare product (e.g., solutions applied to the skin or hair). Specifically, the recombinant silk protein can be incorporated into a silicone replacement component to be used as a base for a cosmetic or skincare product where the recombinant silk polypeptide is present in the base in its monomeric or less-crystalline form. In some embodiments, the silicone replacement component may be used as a base for a cosmetic or skincare product where the recombinant silk polypeptide is present in the base in a semi-crystalline form. In such embodiments, the recombinant silk polypeptide is not present in the base in its monomeric form.

[0157] In most embodiments, the cosmetic formulations are physically stable. In such embodiments, the recombinant silk protein and any other ingredients remain in its formulation for a prolonged period of time, with a prolonged shelf life. On prolonged use, the silicone replacement component remains substantially stable and the ingredients do not precipitate out of the formulation.

[0158] The composition of the invention may be used to apply the silk protein to the skin, nails, hair or mucous membranes, by contacting the composition with the skin, nails, hair or mucous membranes of a subject. Preferably, the inventive composition is used with human subjects.

[0159] In most embodiments, the cosmetic formulations are non-toxic or non-allergenic to subject hosts to which the cosmetic is applied. It is also desirable in the art to produce cosmetic compositions for hair and epidermal contact which will not permanently stain tissue and which can be removed by ordinary washing with aqueous detergents.

[0160] The solids, films, emulsions, hydrogels, and other material forms discussed in various embodiments may contain various humectants, emollients, occlusive agents, active agents, and cosmetic adjuvants, depending on the embodiment and the desired efficacy of the formulation. In some embodiments, the recombinant silk protein functions as a carrier. In some embodiments, the recombinant silk protein is a carrier, delivering one or more agents to a surface such as skin, hair, or nails.

[0161] In some embodiments, the cosmetic formulation comprises a plasticizer. Suitable concentrations of plasticizer by weight in the composition ranges from, e.g.: 1 to 60% by weight, 10 to 60% by weight, 10 to 50% by weight, 10 to 40% by weight, 15 to 40% by weight, 10 to 30% by weight, or 15 to 30% by weight. In some embodiments, the plasticizer is glycerol. In some embodiments, the plasticizer is triethanolamine, trimethylene glycol, polyethylene glycol, propylene glycol, sorbitol, sucrose, a saturated fatty acid, or an unsaturated fatty acid.

[0162] In the instance where water is used as a plasticizer, a suitable concentration of water by weight in the composition ranges from, e.g.: 5 to 80% by weight, 15 to 70% by weight, 20 to 60% by weight, 25 to 50% by weight, 19 to 43% by weight, or 19 to 27% by weight. Where water is used in combination with another plasticizer, it may be present in a range of, e.g., 5 to 50% by weight, 15 to 43% by weight or 19 to 27% by weight.

[0163] In some embodiments, suitable plasticizers may include polyols (e.g., glycerol), water, lactic acid, ascorbic acid, phosphoric acid, ethylene glycol, propylene glycol, triethanolamine, acid acetate, propane-1,3-diol or any combination thereof. In various embodiments, the amount of plasticizer can vary according to the purity and relative composition of the recombinant silk protein. For example, a higher purity powder may have less impurities such as a low molecular weight compound that may act as a plasticizer and therefore require the addition of a higher percentage by weight of plasticizer.

[0164] In some embodiments, the composition comprises a humectant or emollient. The term “humectant” as used herein refers to a hygroscopic substance that forms a bond with water molecules. Suitable humectants include, but are not limited to glycerol, propylene glycol, polyethylene glycol, pentalyene glycol, tremella extract, sorbitol, dicyanamide, sodium lactate, hyaluronic acid, aloe vera extract, alpha-hydroxy acid and pyrrolidonecarboxylate (NaPCA).

[0165] The term “emollient” as used herein refers to a compound that provide skin a soft or supple appearance by filling in cracks in the skin surface. Suitable emollients include, but are not limited to shea butter, cocao butter, squalene, squalane, octyl octanoate, sesame oil, grape seed oil, natural oils containing oleic acid (e.g., sweet almond oil, argan oil, olive oil, avocado oil), natural oils containing gamma linoleic acid (e.g., evening primrose oil, borage oil), natural oils containing linoleic acid (e.g., safflower oil, sunflower oil), or any combination thereof.

[0166] In some instances, an emollient or humectant may be an occlusive agent, and the disclosure contemplates inclusion of an occlusive agent into the composition in various embodiments. The term “occlusive agent” refers to a compound that forms a barrier on the skin surface to retain moisture. Other suitable occlusive agents may include, but are not limited to beeswax, canuba wax, ceramides, vegetable waxes, lecithin, allantoin. Without intending to be limited by theory, the film-forming capabilities of the silicone replacement component presented herein make an occlusive agent that forms a moisture retaining barrier because the recombinant silk polypeptides act attract water molecules and also act as humectants.

[0167] Optionally, the cosmetic formulation comprises an active agent. The term “active agent” refers to any compound that has a known beneficial effect in a hair care, skincare, or cosmetic formulation, including pigment in cosmetic formulations. Various active agents include, but are not limited to, acetic acid (i.e., vitamin C), alpha hydroxyl acids, beta hydroxyl acids, zinc oxide, titanium dioxide, retinol, niacinamide, other recombinant proteins (either as full length sequences or hydrolyzed into subsequences or “peptides”), copper peptides, curcuminoids, glycolic acid, hydroquinone, kojic acid, l-ascorbic acid, alpha lipoic acid, azelaic acid, lactic acid, ferulic acid, mandelic acid, dimethylaminoethanol (DMAE), resveratrol, natural extracts containing antioxidants (e.g. green tea extract, pine tree extract), caffeine, alpha arbutin, coenzyme Q-10, and salicylic acid.

[0168] The term “cosmetic adjuvant” refers to various other agents used to create a cosmetic product with commercially desirable properties, including, without limitation, surfactants, emulsifiers, preserving agents and thickeners.

[0169] As described herein, in various embodiments, the recombinant silk protein may form a semi-solid or gel-like structure that is dispersible. In various embodiments where the recombinant silk protein is compounded into a skin care formulation, the recombinant silk protein may form a non-reversible three-dimensional structure such as a gel or film that transforms into a dispersible liquid upon the surface of the skin.

[0170] In various embodiments, the recombinant silk protein may be suspended in water (“aqueous suspended protein”) to form a silicone replacement component in the form of a film, gel, or base that can be incorporated (i.e., compounded) in a cosmetic or skincare formulation. Depending on the embodiment, the amount of recombinant silk protein to water in the aqueous suspended protein can vary, as can the relative ratio of recombinant silk polypeptide powder to additive in the recombinant silk protein. In some embodiments, the silicone replacement component will comprise 10-33% recombinant silk polypeptide powder by weight. In some embodiments, a different solvent than water will be used. In some embodiments, the recombinant silk protein is suspended in water to create an aqueous suspended protein that is 1-40% recombinant silk protein and 60-99% water. In a specific embodiment, the silicone replacement component is suspended in water to create an aqueous suspended protein that is 10% recombinant silk polypeptide powder by weight, 30% additive by weight and 60% water by weight based on the total weight of the silicone replacement component. In a specific embodiment, the protein is suspended in water to create an aqueous suspended protein that is 6% recombinant silk polypeptide powder by weight, 18% additive by weight and 76% water by weight based on the total weight of the silicone replacement component. In a specific embodiment, the protein is suspended in water to create an aqueous suspended protein that is 10% recombinant silk polypeptide powder by weight and 90% water by weight based on the total weight of the silicone replacement component.

[0171] Depending on the embodiment, the aqueous suspended protein may be optionally heated and agitated when it is re-suspended in water. In some embodiments, heating and agitating the aqueous suspended protein may result in a phase transformation of the recombinant silk polypeptides in the aqueous suspended protein. Specifically, heating and agitating the aqueous suspended protein results in three distinct phases that are assessed by centrifugation: 1) a gel phase that is distinct from the supernatant after centrifugation; 2) a colloidal phase that can be filtered from the supernatant after centrifugation; and 3) a solution phase that remains after filtering the colloidal phase from the supernatant. Various combinations of heat, agitation and centrifugation may be used, provided that the aqueous suspended protein must not be subject to prolonged heat in order to prevent degradation of the recombinant silk polypeptides. In a specific embodiment, the protein is subjected to gentle agitation at 90° C. for 5 minutes and centrifuged at 16,000 RCF for 30 minutes.

[0172] In various embodiments, either the various phases of the aqueous suspended protein (i.e., colloidal phase, gel phase and solution) or the aqueous suspended protein may be incorporated in a cosmetic or skincare formulation to provide a source of recombinant silk protein. Depending on the embodiment, the aqueous suspended protein may be subject to agitation with or without heat before incorporating into a skincare formulation. Optionally, the aqueous suspended protein may be separated in the above-discussed phases by centrifugation and/or filtering. Depending on the embodiment, the skincare formulation may be an emulsion (e.g., a cream or serum) or a primarily aqueous solution (e.g., a gel). In certain embodiments, the recombinant silk protein may be incorporated into any of the cosmetic, skin care, or hair care formulations described herein without aqueous resuspension. In these compositions, a homogenizer or similar equipment may be used to ensure that the recombinant silk protein is uniformly distributed in the composition.

[0173] In some embodiments, the aqueous suspended protein may be subject to heat and agitation, then cast onto a flat surface and dried into a film. In some embodiments, the aqueous suspended protein may be cast onto a flat surface and dried into a film without being subjected to heat and/or agitation. In such embodiments, the aqueous suspended protein may be cast onto a flat surface and dried into a film without being subjected to additional processing. In some embodiments, the aqueous suspended protein may be incorporated into an emulsion, then cast onto a flat surface and dried into a film. Depending on the embodiment, various different drying conditions may be used. Suitable drying conditions include drying at 60° C. or at 80° C. with and without a vacuum. In embodiments that use a vacuum, 15 Hg is a suitable amount of vacuum. Other methods of drying are well established in the art.

[0174] In various embodiments, the films comprising the aqueous suspended protein alone have a low melting temperature. In various embodiments, the films comprising the aqueous suspended protein alone have melting temperature that is less than body temperature (around 34-36° C.) and melts upon contact with skin. Without intending to be limited by theory, the recombinant silk polypeptide forms enough intermolecular interactions to make a semi-solid structure (i.e., film); however this structure is reversible upon skin contact and can be re-formed after dispersion on the skin surface. In various embodiments, the film will have reduced crystallinity compared to the recombinant silk protein or the recombinant silk powder, as measured by Fourier-transform infrared spectroscopy (FTIR). In various embodiments, the films comprising the aqueous suspended protein do not melt upon contact with skin. In such embodiments, the film functions as a barrier. In various embodiments, the film is a hydrophobic film of low density. The film or barrier may range from about 1 μm to about 50 μm in thickness, from about 10 μm to about 30 μm, or from about 20 μm to about 40 μm in thickness. Upon contact with skin, the barrier may be formed on the surface of the epidermal layer, materializing a robust, non-specific adherence is made to the skin surface. In some embodiments, the thickness of the film changes depending on the concentration of recombinant silk protein and surface area of application.

[0175] In some embodiments, the barrier is long-lasting and prevents against one or more environmental stressors, including wind, humidity, harsh additives, pollution, abrasion, dirt, and grease. The barrier may withstand abrasion equivalent to at least 100 rubs by hand, at least 200 rubs, at least 400 rubs, at least 600 rubs, or at least 800 rubs.

[0176] In one specific embodiment, the aqueous suspended protein or the protein may be incorporated (e.g., homogenized) into an emulsion, then cast on a flat surface and lyophilized to create a porous film. Depending on the embodiment, various techniques may be used for lyophilization, including freezing the film at −80° C. for 30 minutes. Other lyophilization techniques will be well known to those skilled in the art.

[0177] In various embodiments, the above-described films can be used as a topical skincare agent. This film may be applied directly to the skin and can be re-hydrated to form a dispersible viscous substance that is incorporated into the skin. As discussed herein, various emollients, humectants, active agents, and other cosmetic adjuvants may be incorporated into the film. This film may be applied directly to the skin and adsorb to the skin due to contact with the skin, or after gently rubbing the film into the skin. In some embodiments, the film may be applied directly the skin and adsorb to the skin without additional rubbing or contact. In some embodiments, the protein resuspended in an aqueous solution may be applied to the face and then exposed to a coagulant such as propylene glycol via mist to form a gellable mask.

[0178] Depending on the embodiment, the film that is cast may be a flat film (i.e., with no surface variability) or may be cast on a mold that incorporates microstructures. In a specific embodiment, the film that is cast on a mold that incorporates microneedle structures to prick the surface of the skin and assist in delivery of active agents.

[0179] In an alternate embodiment, the aqueous suspended protein may be added to an emulsion that is used as a cosmetic product. The emulsion may be applied to skin or hair and then allowed to form a film on the surface of the skin upon drying. As discussed herein, various emollients, humectants, active agents, and other cosmetic adjuvants may be incorporated into the emulsion.

[0180] In some embodiments, the compositions of the disclosure may be liquid or semi-solid, such as creams, lotions, and gels. The compositions useful in the subject invention may be made into a wide variety of product forms that are known in the art. These include, but are not limited to, powders, lotions, creams, gels, patches, serums, ampules, powders, sticks, sprays, ointments, pastes, mousses, ointments, liquids, emulsions, foams, or aerosols. These product forms may comprise several types of additives, as further discussed herein, including, but not limited to, solutions, aerosols, emulsions, gels, solids, and liposomes. The compounds which are active in the compositions and methods of this invention may be delivered topically by any means known to those of skill in the art.

[0181] In some other embodiments, the compositions may be basic cosmetic compositions such as facial cleansers, such as toilet water, cream, essence, cleansing foam and cleansing water; pack and body oil; color cosmetic compositions such as foundation, lipstick, mascara, and make-up base; hair product compositions such as shampoo, rinse, hair conditioner and hair gel; soap; and the like. The cosmetic formulation can be prepared in any method known in the art, using the silicone replacement component described herein, optionally together with at least one carrier and/or additive, which are commonly used in the field of preparing cosmetic compositions.

[0182] In some embodiments, the compositions comprise at least one cosmetic agent. Examples of cosmetic agents include emollients, humectants, colorants, pigments, fragrances, moisturizers, viscosity modifiers and any other cosmetic forming agent. One or more cosmetic agents can be included in the cosmetic composition. In another embodiment, additional active ingredients as known in the art and described herein may also be used, including, but not limited to, a skin softener, a skin permeation enhancer, a colorant, an aromatic, an emulsifier, and a thickener. Also, the cosmetic composition may further comprise a perfumery, a pigment, a bactericidal agent, an antioxidant, a preservative, and/or a moisturizer, as well as inorganic salts and synthetic polymer substances, for, e.g., the purpose of improving physical properties.

[0183] The composition may also be delivered topically via a lotion. Single emulsion skin care preparations, such as lotions and creams, of the oil-in-water type and water-in-oil type are well-known in the cosmetic art and are useful in the subject invention. Multiphase emulsion compositions, such as the water-in-oil-in-water type, are also useful in the subject invention. In general, such single or multiphase emulsions contain water, emollients, and emulsifiers as essential ingredients.

[0184] The compositions of the present invention can also be formulated into a solid formulation (e.g., a wax-based stick, soap bar composition, powder, bead, exfoliant, or a wipe containing liquid or powder).

[0185] The compositions of this invention can be formulated as a gel (e.g., an aqueous gel using a suitable gelling agent(s)). Suitable gelling agents for aqueous gels include, but are not limited to, natural gums, acrylic acid and acrylate polymers and copolymers, and cellulose derivatives (e.g., hydroxymethyl cellulose and hydroxypropyl cellulose). Suitable gelling agents for oils (such as mineral oil) include, but are not limited to, hydrogenated butylene/ethylene/styrene copolymer and hydrogenated ethylene/propylene/styrene copolymer. Such gels typically comprise between about 0.1% and 5%, by weight, of such gelling agents. In some embodiments, such compositions include a combination of recombinant silk protein, water (Aqua), sodium C14-16 olefin sulfonate, glycerin, cocoa betaine, sodium benzoate, sodium hydroxide, calcium gluconate, sodium hyaluronate, propanediol, xanthan gum, gluconolactone, and tetrasodium glutamate diacetate. In some embodiments, compositions comprise a cleansing detergent, soap, serum, or toner. In a specific embodiment, the serum is aqueous-based. In another specific embodiment, the toner is alcohol-based.

[0186] The compositions useful in the present invention may be formulated as emulsions. If the composition is an emulsion, in some embodiments, from about 1% to about 10% or from about 2% to about 5% of the composition comprises an emulsifier. Emulsifiers may be nonionic, anionic or cationic. Suitable emulsifiers are disclosed in, for example, INCI Handbook, pp. 1673-1686. Lotions and creams can be formulated as emulsions. In some embodiments, the composition is an emulsion and the recombinant silk protein is an emulsifier. In some embodiments, the composition is an emulsion, the recombinant silk protein is an emulsifier, and the composition is free of other emulsifiers.

[0187] Yet another type of composition may be an ointment. An ointment may comprise a simple base of animal or vegetable oils or semi-solid hydrocarbons. An ointment may comprise from about 2% to about 10% of an emollient in addition to from about 0.1% to about 2% of a thickening agent. Examples of thickening agents include, e.g., cellulose derivatives (methyl cellulose and hydroxyl propylmethylcellulose), synthetic high molecular weight polymers (e.g., carboxyvinyl polymer and polyvinyl alcohol), plant hydrocolloids (e.g., karaya gum and tragacanth gum), clay thickeners (e.g., colloidal magnesium aluminum silicate and bentonite), carboxyvinyl polymers, carboxylic acid polymers, crosslinked polyacrylates, polyacrylamides, xanthan gum, and mixtures thereof.

[0188] The compositions useful in the subject invention may contain, in addition to the aforementioned components, a wide variety of additional oil-soluble materials and/or water-soluble materials conventionally used in compositions for use on skin, hair, and nails at their art-established levels.

[0189] The compositions of the present invention may be directly applied to the skin or may be applied onto other delivery implements such as wipes, sponges, brushes, and the like. The compositions may be used in products designed to be left on the skin, wiped from the skin, or rinsed off of the skin.

[0190] In some embodiments, the composition improves the appearance of skin, such as increasing skin firmness/plumpness, increasing elasticity, improving overall skin health, increasing hydration, accelerating and/or improving wound healing, improving pollution defense, reducing dermatological aging, decreasing skin fragility, preventing and reversing loss of collagen and/or elastin, preventing skin atrophy, promoting/accelerating cell turnover, increasing genetic expression, improving skin texture, preventing and decreasing fine lines and wrinkles, improving skin tone, enhancing skin thickness, decreasing pore size, minimizing skin discoloration, restoring skin luster, minimizing signs of fatigue, improving skin barrier function, minimizing skin dryness, preventing, reducing, or treating hyperpigmentation, improving the mitochondrial function of the skin, improves exfoliation, reduces toxicity, mattifying skin, reducing oxidative stress levels, attenuating pollution induced oxidative stress, attenuating UVA or UVB induced oxidative stress, or any combination thereof.

[0191] The compositions of various embodiments defend against pollutants and other irritants. As a result, many skin conditions, such as acne, the redness associated with rosacea (adult acne), and other inflammatory conditions can be actively managed by application of the cosmetic formulations.

### Coagulants

[0192] In some embodiments, a recombinant silk polypeptide containing composition and/or a silicone replacement component as described herein is exposed to a coagulant. This can change the properties of the composition/component to facilitate controlled aggregation of silk in the silk-based composition. In some embodiments, composition/component is submerged in a coagulant. In some embodiments, the composition/component is exposed to a coagulant mist or vapor. In one embodiment, an aqueous protein composition comprises or is submerged with or mixed with a coagulant. In some embodiments, a silk-based solid or semi-solid, such as a film, is submerged in or exposed to a vapor comprising coagulant. In some embodiments, methanol is used as an effective coagulant.

[0193] In some embodiments, alcohol (e.g., isopropanol, ethanol, or methanol) can be used as a coagulant or solvent. In some embodiments, 60%, 70%, 80%, 90% or 100% alcohol is used as a coagulant. In some embodiments, a salt can be used as a coagulant. Examples of salts include, but are not limited to, ammonium sulfate, sodium chloride, sodium sulfate, and other protein precipitating salts effective at a temperature from 20 to 60° C.

[0194] In some embodiments, a combination of one or more of water, acids, solvents, and salts, including, but not limited to, the following classes of chemicals of Brönsted-Lowry acids, Lewis acids, binary hydride acids, organic acids, metal cation acids, organic solvents, inorganic solvents, alkali metal salts, and alkaline earth metal salts can be used as a coagulant. In some embodiments, the acids comprise dilute hydrochloric acid, dilute sulfuric acid, formic acid, or acetic acid. In some embodiments, the solvents comprise ethanol, methanol, isopropanol, t-butyl alcohol, ethyl acetate, propylene glycol, or ethylene glycol. In some embodiments, the salts comprise LiCl, KCl, BeCl₂, MgCl₂, CaCl₂, NaCl, ZnCl₂, FeCl₃, ammonium sulfate, sodium sulfate, sodium acetate, or other salts of nitrates, sulfates or phosphates. In some embodiments, the coagulant is at a pH from 2.5 to 7.5.

### Other Additives

[0195] In some embodiments, a composition in accordance with the disclosure and/or the silicone replacement component thereof can include one or more additives. This can change the properties of the composition as it interacts with the skin. In some embodiments, the silk-based composition is submerged in the additive. In some embodiments, the composition/component is exposed to the additive mist or vapor. In one embodiment, an aqueous protein composition comprises or is submerged with or mixed with the additive. In some embodiments, a silk-based solid or semi-solid, such as a film, is submerged in or exposed to a vapor comprising the additive. In some embodiments, the silk-based gel is exposed to the additive prior to hallow powder formation (e.g., the silk-based gel and additive are co-spray dried together).

[0196] The additive can itself be inert or it can possess dermatological benefits of its own. The additive should also be physically and chemically compatible with the essential components described herein, and should not unduly impair stability, efficacy or other use benefits associated with the compositions of the present invention. The type of additive utilized in the present invention depends on the type of product form desired for the composition. In some embodiments, the additive is an acid textile dye.

[0197] Pigments are frequently added to cosmetic formulations to achieve a desired color for application to the skin. Such pigments are known and the concentrations required to achieve a desired coloring are readily determinable. Pigments may be inorganic or organic. Inorganic pigments include iron oxides (red, black, brown colors), manganese violet, ultramarines (green, blue, pink, red, or violet aluminum sulfosilicates), aquamarines, copper powder, mica, clays, silica, and titanium dioxide. Organic dyes that have been certified by the US FDA for cosmetic use generally have the prefix “D&C” and a suffix of a color and a number (for example, D&C Green #3).

[0198] Certain embodiments of the present invention contain from about 0% to about 30%, from about 1% to about 20%, from about 2% to about 15%, or from about 5% to about 15% of a colorant, on an anhydrous pigment weight basis. These are usually aluminum, barium or calcium salts or lakes. Dyes may be present at a concentration of from about 0% to about 3% and pearlizing agents and the like from 0% to about 10%. Such dyes in combination with recombinant silk proteins are stable and have a long shelf-life. The shelf-life of such compositions may be about 6 months, about 1 year, or about 2 years. In some embodiments, the shelf-life of such compositions may be at least 5 years.

[0199] There are no specific limitations as to the pigment, colorant, or filler powders used in the composition. Each may be a body pigment, inorganic white pigment, inorganic colored pigment, pearling agent, and the like. Specific examples are talc, mica, magnesium carbonate, calcium carbonate, magnesium silicate, aluminum magnesium silicate, silica, titanium dioxide, zinc oxide, red iron oxide, yellow iron oxide, black iron oxide, ultramarine, polyethylene powder, methacrylate powder, polystyrene powder, silk powder, crystalline cellulose, starch, titanated mica, iron oxide titanated mica, bismuth oxychloride, and the like.

[0200] Additional pigment/powder fillers include, but are not limited to, inorganic powders such as gums, chalk, Fuller's earth, kaolin, sericite, muscovite, phlogopite, synthetic mica, lepidolite, biotite, lithia mica, vermiculite, aluminum silicate, starch, smectite clays, alkyl and/or trialkyl aryl ammonium smectites, chemically modified magnesium aluminum silicate, organically modified montmorillonite clay, hydrated aluminum silicate, fumed aluminum starch octenyl succinate barium silicate, calcium silicate, magnesium silicate, strontium silicate, metal tungstate, magnesium, silica alumina, zeolite, barium sulfate, calcined calcium sulfate (calcined gypsum), calcium phosphate, fluorine apatite, hydroxyapatite, ceramic powder, metallic soap (zinc stearate, magnesium stearate, zinc myristate, calcium palmitate, and aluminum stearate), colloidal silicone dioxide, and boron nitride; organic powder such as polyamide resin powder (nylon powder), cyclodextrin, methyl polymethacrylate powder, copolymer powder of styrene and acrylic acid, benzoguanamine resin powder, poly(ethylene tetrafluoride) powder, and carboxyvinyl polymer, cellulose powder such as hydroxyethyl cellulose and sodium carboxymethyl cellulose, ethylene glycol monostearate; and inorganic white pigments such as magnesium oxide. Other useful powders are disclosed in U.S. Pat. No. 5,688,831, to El-Nokaly et al., issued Nov. 18, 1997, herein incorporated by reference in its entirety. These pigments and powders can be used independently or in combination.

[0201] Besides the silk protein, the composition according to the invention can further comprise a film-forming substance. Examples of film-forming substances include, e.g., cellulose derivatives, nitrocellulose, acrylic polymers or copolymers, acrylic, styrene, acrylate-styrene and vinyl resins, vinyl copolymers, polyester polymers, arylsulphonamide resins, and alkyde resins.

[0202] In some embodiments, the composition may include an amphoteric surfactant, a phospholipid, or a wax.

[0203] Examples of other additives include, but are not limited to, cannabidiol, foaming surfactants, depigmentation agents, reflectants, detangling/wet combing agents, amino acids and their derivatives, antimicrobial agents, allergy inhibitors, anti-acne agents, anti-aging agents, anti-wrinkling agents antiseptics, analgesics, antitussives, antipruritics, local anesthetics, anti-hair loss agents, hair growth promoting agents, hair growth inhibitor agents, antihistamines, antiinfectives, inflammation inhibitors, anti-emetics, anticholinergics, vasoconstrictors, vasodilators, wound healing promoters, peptides, polypeptides and proteins, deodorants and antiperspirants, medicament agents, skin emollients and skin moisturizers, skin firming agents, hair conditioners, hair softeners, hair moisturizers, vitamins, tanning agents, skin lightening agents, antifungals, depilating agents, shaving preparations, external analgesics, perfumes, counterirritants, hemorrhoidals, insecticides, poison ivy products, poison oak products, burn products, anti-diaper rash agents, prickly heat agents, make-up preparations, vitamins, herbal extracts, retinoids, flavenoids, sensates, anti-oxidants, skin conditioners, hair lighteners, chelating agents, cell turnover enhancers, sunscreens, anti-edema agents, collagen enhancers, and mixtures thereof.

[0204] Examples of suitable vitamins nonexclusively include vitamin B complex, including thiamine, nicotinic acid, biotin, pantothenic acid, choline, riboflavin, vitamin B6, vitamin B12, pyridoxine, inositol, camitine; vitamins A, C, D, E, K and their derivatives such as vitamin A palmitate and pro-vitamins, (e.g., panthenol (pro vitamin B5) and panthenol triacetate) and mixtures thereof.

[0205] Examples of sunscreen agents include, but are not limited to, avobenzone, benzophenones, bornelone, butyl paba, cinnamidopropyl trimethyl ammonium chloride, disodium distyrylbiphenyl disulfonate, paba, potassium methoxycinnamate, butyl methoxydibenzoylmethane, octyl methoxycinnamate, oxybenzone, octocrylene, octyl salicylate, phenylbenzimidazole sulfonic acid, ethyl hydroxypropyl aminobenzoate, menthyl anthranilate, aminobenzoic acid, cinoxate, diethanolamine methoxycinnamate, glyceryl aminobenzoate, titanium dioxide, zinc oxide, oxybenzone, Padimate O, red petrolatum, and mixtures thereof.

[0206] The amount of additive to be combined with the composition may vary depending upon, for example, the ability of the additive to penetrate through the skin, hair, or nail; the specific additive chosen; the particular benefit desired; the sensitivity of the user to the additive; the health condition, age, and skin, hair, and/or nail condition of the user; and the like. In sum, the additive is used in a “safe and effective amount,” which is an amount that is high enough to deliver a desired skin, hair, or nail benefit or to modify a certain condition to be treated, but is low enough to avoid serious side effects, at a reasonable risk to benefit ratio within the scope of sound medical judgment.

[0207] The invention illustratively disclosed herein suitably may be practiced in the absence of any component, ingredient, or step which is not specifically disclosed herein. Several examples are set forth below to further illustrate the nature of the invention and the manner of carrying it out. However, the invention should not be considered as being limited to the details thereof.

[0208] The compositions and methods of the present invention provide for skin equal or better performance for softness, quick absorption, easy spreadability (or “playtime”), lightweight film formation, and non-greasy afterfell as compared to compositions containing silicone elastomers. Additionally, if the skin is being treated with an SPF composition, then the invention provides equal or better performance for low white cast. The compositions and methods of the present invention provide for hair equal or better performance for long-lasting wear, shine, non-greasiness, frizz control, adding thickness to the hair, styling retention, electrostatic properties, resistance to heat, and UV-radiation and pollution defense.

### Equivalents and Scope

[0209] Those skilled in the art will recognize, or be able to ascertain using no more than routine experimentation, many equivalents to the specific embodiments in accordance with the invention described herein. The scope of the present invention is not intended to be limited to the above Description, but rather is as set forth in the appended aspects.

[0210] In the aspects, articles such as “a,” “an,” and “the” may mean one or more than one unless indicated to the contrary or otherwise evident from the context. Aspects or descriptions that include “or” between one or more members of a group are considered satisfied if one, more than one, or all of the group members are present in, employed in, or otherwise relevant to a given product or process unless indicated to the contrary or otherwise evident from the context. The invention includes embodiments in which exactly one member of the group is present in, employed in, or otherwise relevant to a given product or process. The invention includes embodiments in which more than one, or all of the group members are present in, employed in, or otherwise relevant to a given product or process.

[0211] It is also noted that the term “comprising” is intended to be open and permits but does not require the inclusion of additional elements or steps. When the term “comprising” is used herein, the term “consisting of” and “consisting essential of” is thus also encompassed and disclosed.

[0212] Where ranges are given, endpoints are included. Furthermore, it is to be understood that unless otherwise indicated or otherwise evident from the context and understanding of one of ordinary skill in the art, values that are expressed as ranges can assume any specific value or subrange within the stated ranges in different embodiments of the invention, to the tenth of the unit of the lower limit of the range, unless the context clearly dictates otherwise.

[0213] All cited sources, for example, references, publications, databases, database entries, and art cited herein, are incorporated into this application by reference, even if not expressly stated in the citation. In case of conflicting statements of a cited source and the instant application, the statement in the instant application shall control.

[0214] Section and table headings are not intended to be limiting.

### EXAMPLES

[0215] Below are examples of specific embodiments for carrying out the present invention. The examples are offered for illustrative purposes only, and are not intended to limit the scope of the present invention in any way. Efforts have been made to ensure accuracy with respect to numbers used (e.g., amounts, temperatures, etc.), but some experimental error and deviation should, of course, be allowed for.

[0216] The practice of the present invention will employ, unless otherwise indicated, conventional methods of protein chemistry, biochemistry, recombinant DNA techniques and pharmacology, within the skill of the art. Such techniques are explained fully in the literature. See, e.g., T. E. Creighton, Proteins: Structures and Molecular Properties (W. H. Freeman and Company, 1993); A. L. Lehninger, Biochemistry (Worth Publishers, Inc., current addition); Sambrook, et al., Molecular Cloning: A Laboratory Manual (2nd Edition, 1989); Methods In Enzymology (S. Colowick and N. Kaplan eds., Academic Press, Inc.); Remington's Pharmaceutical Sciences, 18th Edition (Easton, Pennsylvania: Mack Publishing Company, 1990); Carey and Sundberg Advanced Organic Chemistry 3rd Ed. (Plenum Press) Vols A and B (1992).

### Example 1: Recombinant Silk Polypeptide as Replacement for Silicones in SPF Formulation

[0217] In this example, we show that recombinant silk polypeptide matches and outperforms silicone (i.e., blend of linear silicones and cyclosiloxanes) for certain characteristics of a SPF skincare product. A mineral SPF formulation that originally contained 2% combined linear silicones and cyclosiloxanes (1% of each component) was reformulated with 1.5% recombinant silk polypeptide and evaluated for its aesthetic profile. The recombinant silk polypeptide was preferred over the silicone formulation in a blind comparison for white cast, absorption, film feel, and oiliness, while matching the silicone formulation in playtime and softness performance.

[0218] Methods: The SPF formulation was prepared similar to standard practices in the field. The water phase ingredients were mixed together separately, and the oil phase ingredients were mixed together separately. The two were combined with gentle mixing at an elevated temperature of 80-85 degree C. The ingredients were mixed continually until uniform and then cooled to 30-45 degree C. An 18B recombinant silk polypeptide comprising SEQ ID NO: 2878 was added to the formulation after the water and oil phases were mixed together and cooled to 30-45 degree C. The formulation was continually mixed while cooling to room temperature. Water was used to make up the difference in weight percent of recombinant silk polypeptide and silicone elastomer between formulations. For this formulation, a recombinant silk polypeptide in the powder form was used.

[0219] The spider chart was prepared with a blind comparison test, where subjects were asked to compare the two formulations on a scale of 1-5 for six different attributes (Key: 1=Unfavorable, 2=Bad, 3=Satisfactory, 4=Good, 5=Excellent). Ten (10) different individuals tested the products on their face for one full week. Skin types varied from oily, dry, and combination.

[0220] FIG. 1A illustrates a top-down view of the SPF formulations

[0221] FIG. 1B shows a spider chart plotting the data from the blind test comparison of 10 subjects. The 1.5% recombinant silk polypeptide formulation outperformed the 2% silicone formulation for desirable white cast, absorption, film feel, and oiliness. The 1.5% recombinant silk polypeptide formulation performed similarly as the 2% silicone formulation for spreadability and softness.

[0222] FIG. 1C: Table of ingredients used in the SPF formulations (not including the recombinant silk polypeptide and silicones).

[0223] FIG. 1D: While the SPF formulation that contains the 1.5% recombinant silk polypeptide outperformed the 2% silicone formulation for desirable white cast, absorption, film feel, and oiliness, the rheology data shows similarity between the three formulations. The frequency sweeps show similar magnitude and shape of the G′ and G″ curve. This data supports that the SPF formulations have similar gel-like structural properties.

[0224] FIG. 1E: Light microscopy images of SPF base and SPF base formulated with 1% recombinant silk polypeptide protein or 5% silicone elastomer ingredient. The SPF base and the 5% silicone elastomer samples exhibit typical dispersion morphology, which has regions that are more transparent and other regions that are opaque. The 1% recombinant silk polypeptide sample clearly has the visible presence of particles that are hollow and 2-200 μm in diameter and show up as bright circles. A white arrow is added to the figure to point out an example silk powder particle. A reference image of 1% recombinant silk polypeptide powder suspended in water is included.

### Example 2: Recombinant Silk Polypeptide as Replacement for Silicones in Color Cosmetic Product

[0225] Recombinant silk polypeptide matches and outperforms silicone elastomer for certain characteristics of a color cosmetic product. A pigmented 3-in-1 cream eye/cheek/lip formulation was prepared with either 1% recombinant silk polypeptide or 5% or 10% silicone elastomer and evaluated for its aesthetic profile. The recombinant silk polypeptide formulation outperformed the silicone elastomer and provided improved spreadability, even pigment delivery, and soft dry-down (i.e., not sticky or greasy like the silicone elastomer version) that was also resistant to wipe-off.

[0226] Methods: The color cosmetic formulation was prepared similar to standard practices in the field. All waxes, oils, and solvents were brought to room temperature or to an elevated temperature separately, for example, to greater than 37 degrees C. but less than 90 degrees C. The oils and solvents were mixed with the pigment and lightly milled. Then the waxes were added to the mixture and cooled. The b-silk protein (i.e., 18B recombinant silk polypeptide comprising SEQ ID NO: 2878) and/or silicone elastomer ingredients can be added at any stage of the process. Water was used to make up the difference in weight percent of recombinant silk polypeptide and silicone elastomer between formulations. For this formulation, a recombinant silk polypeptide in powder form was used, and a silicone elastomer ingredient with approximately 30% solids was used.

[0227] Testing of the pigment application and wipe off include applying 10 mg of the product to a 1 cm×1 cm square area and allowing the product to dry for 15 minutes. To test wipe off, a white tissue paper was laid on the skin and 200 g mass was set on the skin. The tissue was pulled over the skin 3 times and the wipe off characteristic was evaluated visually.

[0228] Rheology measurements were taken with a Kinexus Lab+Rheometer using a 2 degree/20 mm cone and plate geometry. To measure the G′ and G″ of the materials a frequency sweep was performed at 0.1% strain rate. The start frequency was 100 s⁻¹ and the end frequency was 0.01 s⁻¹.

[0229] FIG. 2A: Top-down view of the color cosmetic formulations.

[0230] FIG. 2B: Step-by-step visual of how the color cosmetic was evaluated for pigment delivery and substantiation to skin.

[0231] FIG. 2C: Representative images of color application and wipe-off of the product. Compared to the 5% and 10% elastomer products, the recombinant silk polypeptide had more even pigment spreading on skin and was more substantial to skin during wipe-off.

[0232] FIG. 2D: Table of ingredients used in the color cosmetic formulations (not including the recombinant silk polypeptide and silicones).

[0233] FIG. 2E: Light microscopy images of color cosmetic base and the base formulated with 1% b-silk protein or 5% silicone elastomer ingredient. The SPF base and the 5% silicone elastomer samples exhibit typical dispersion morphology, which has regions that are more transparent and other regions that are opaque. The 1% recombinant silk polypeptide sample clearly has the visible presence of particles that are hollow and 2-200 μm in diameter and show up as bright circles. A white arrow is added to the figure to point out an example silk powder particle.

[0234] FIG. 2F: While the color cosmetic formulation that contains the 1% recombinant silk protein is distinctly different from the 5% and 10% formulations as measured by performance characteristics and microscopy, the rheology data shows similarity between the three formulations. The frequency sweeps show similar magnitude and shape of the G′ and G″ curve. This data indicates that the color cosmetics have similar gel-like structural properties.

### Example 3: Recombinant Silk Polypeptide as Replacement for Silicone Elastomers in a Hair Serum

[0235] A leave-in hair serum was prepared with either 1% recombinant silk polypeptide or 5% silicone elastomer. The formulations behaved similarly for styling including shine, curl retention, and frizz control.

[0236] Methods: The hair serum formulation was prepared similar to standard practices in the field. With moderate mixing, all the ingredients were combined until completely uniform. Water was used to make up the difference in weight percent of recombinant silk polypeptide (i.e., 18B silk) and silicone elastomer between formulations. For this formulation, a recombinant silk polypeptide in the powder form was used and a silicone elastomer ingredient with approximately 30% solids was used.

[0237] Rheology measurements were taken with a Kinexus Lab+Rheometer using a 2 degree/20 mm cone and plate geometry. To measure the G′ and G″ of the materials an amplitude sweep was performed at 1 s⁻¹ frequency over a range of shear strains from 0.01% to 250%. Additionally a frequency sweep was performed at 0.1% strain rate. The start frequency was 100 s⁻¹ and the end frequency was 0.01 s⁻¹.

[0238] To evaluate the morphology of the formulation on the hair, 0.25 g of the formulation was evenly spread onto 0.35 g of yak hair with gentle massaging. The hair was then dried with hot air at 200 degrees C. for 5 minutes until dry to the touch. Scanning electron microscopy (SEM) used a focus electron beam to assess the morphology of materials through the secondary electrons. The electron beam was scanned in a raster pattern to collect micrographs at scales between 1 mm and 10 nm or between 10× and 100,000× magnification. The SEM method used low vacuum (1 to 10 torr), avoiding the need for dehydrating or sputter coating biological samples.

[0239] Light microscopy images were used to examine the formulation powder morphology and were obtained using a Leica DM750P light microscope, using a 10× objective. The Microscope was coupled to the complementary PC based image analysis Leica Application Suite, LAS V4.9 for capturing images.

[0240] FIG. 3A: Light microscopy images of hair serum formulations with and without 1% recombinant silk polypeptide and 5% silicone elastomer. The base serum and the silicone elastomer samples have uniform structure as evidenced by the absence of any visually distinct features. The 1% recombinant silk polypeptide sample clearly has the visible presence of recombinant silk polypeptide particles that are hollow and 2-200 μm in diameter.

[0241] FIG. 3B: SEM images of the hair serum formulation dispersed onto yak hair.

[0242] Approximately 0.25 g of serum was dispersed onto 0.35 g of hair. Compared to the untreated, all serum samples visibly coat the hair strand. Only the recombinant silk polypeptide serum resulted in a distinct surface morphology that is marked by regions of smooth film, regions of rough film, and regions of particles.

[0243] FIG. 3C: While the serum formulation that contained the 1% recombinant silk protein was distinctly different as measured by microscopy, the rheology data showed similarity between the three formulations. The amplitude sweeps show similar magnitude and lengths of the linear viscoelastic regions (refer to the G′ curve). Additionally, the frequency sweeps show similar magnitude and length of the G′ curve. This data indicates that the hair serums have similar gel-like structural properties and will perform rheologically similarly.

[0244] FIG. 3D: Table of ingredients used in the hair serum formulations (not including the recombinant silk polypeptide and silicones).

### Example 4: Rheological Comparison and Morphological Comparison of the Recombinant Silk Polypeptide to the Silicone Elastomer Ingredient

[0245] Methods: Rheology measurements were taken with a Kinexus Lab+Rheometer using a 2 degree/20 mm cone and plate geometry. To measure the G′ and G″ of the materials, a frequency sweep was performed at 0.1% strain rate. The start frequency was 100 s⁻¹ and the end frequency was 0.01 s⁻¹. Three samples were taken per decade. Viscosity measurements were taken by shearing the sample over the shear rate of 0.1 s⁻¹-1000 s⁻¹. All rheology and viscosity measurements were taken at 22-27 degrees. The recombinant silk protein solution (comprising 18B silk) was prepared by mixing powder with DI water in a high shear mixer.

[0246] To evaluate the morphology of the formulation on the hair, 0.25 g of the formulation was evenly spread onto 0.35 g of yak hair with gentle massaging. The hair was then dried with hot air at 200 degrees C. for 5 minutes until dry to the touch. Scanning electron microscopy (SEM) used a focus electron beam to assess the morphology of materials through the secondary electrons. The electron beam was scanned in a raster pattern to collect micrographs at scales between 1 mm and 10 nm or between 10× and 100,000× magnification. The SEM method used low vacuum (1 to 10 torr), avoiding the need for dehydrating or sputter coating biological samples.

[0247] FIG. 4A: Comparison of the G′ and G″ of an industry standard silicone elastomer gel (dry solids of 30%) and 12% recombinant silk polypeptide. Despite silicone elastomers and recombinant silk polypeptides having very different molecular make ups, crosslinking chemistries, and macromolecular morphologies, both materials exhibit similar rheological properties. This is typified by a flat G′ curve in the rheological frequency sweep. This flat curve indicates that both materials are structured gels. In the viscosity curves, both materials display similar non-Newtonian, shear thinning profiles typical of polymeric solutions and suspensions.

[0248] FIG. 4B: SEM images of the neat recombinant silk polypeptide and silicone elastomer dispersed onto yak hair. Approximately 0.25 g of serum was dispersed onto 0.35 g of hair. Compared to the untreated, both the recombinant silk polypeptide and silicone elastomer deposited a visible film on the hair shaft. The silicone elastomer film is relatively smooth. The recombinant silk polypeptide film is characterized by a more rough surface with visible pits and particles protruding from its surface.

[0249] Viscosity measurements as set forth in this Example 4 also were obtained for commercially available silicone elastomers in diluents and 18B recombinant silk polypeptide in water as follows: 1) Specsil K-13 (Innospec, Englewood, Colorado), 10% w/w in cyclopentasiloxane; 2) Silmer G-162-F5 (Siltech, Toronto, Ontario), 15% w/w in dimethicone; 3) CHT-beausil gel 8055 (CHT, Tubingen, Germany), 5% w/w in dimethicone; 4) Dowsil HMW 2220 non-ionic emulsion (Dow, Midland, Michigan), 60% w/w in C12-13 Pareth-23 and C12-13 Pareth 3; and 5) 18B recombinant silk polypeptide (19% recombinant silk polypeptide in water; 22% recombinant silk polypeptide in water; 25% silk polypeptide in water; and 27% silk polypeptide in water). All materials tested displayed similar non-Newtonian, shear thinning profiles typical of polymeric solutions and suspensions.

[0250] Comparison of the G′ and G″ of CHT-beausil gel 8055, 5% w/w in dimethicone, with 27% 18B recombinant silk polypeptide in water also was performed. Both materials exhibited similar curves where G′ dominated over G″ in the magnitude range of 30 Pa up to 16000 Pa over the angular frequency range of 1-100 Hz.

### Example 5: Style Retention Test of a Leave-In Hair Styling Serum Containing Recombinant Silk Polypeptide

[0251] Hair swatches of virgin hair (medium brown, 3 g, 1 in width, 8 in length, sealed with hot melt) were treated with 1 g of leave-in hair serum. The leave-in hair serum contained serum base only, or serum base with either 1% silk polypeptide, 1% keratin ingredient, or 5% silicone elastomer ingredient. The formulation for the serum base is outlined in FIG. 3D. The hair swatches were rolled up tightly into a ¾″ diameter curler and mounted to a grid board with 1 cm wide markings. The samples were incubated in an oven at 50° C., 70% humidity for eight (8) hours. After 8 hours, samples were removed from the oven, cooled to room temperature, and unrolled.

[0252] FIG. 5 shows image of hair swatches after exposure to the curl retention testing modality as described above. The recombinant silk polypeptide sample outperformed all other samples with improved curl retention. Quantification of the hair swatch length after exposure to the curl retention testing modality is shown in Table 2. The recombinant silk polypeptide exhibited 35% more curl retention than the base serum and 28% more curl retention than the silicone elastomer sample.

TABLE 2

| | Length | % improvement over |
|---|---|---|
| Sample | [cm] | serum base |
| Serum Base | 18 | 0 |
| Serum Base + 5% | 16 | 11 |
| elastomer | | |
| Serum Base + 1% | 18.5 | −6 |
| keratin | | |
| Serum Base + 1% | 11.5 | 35 |
| recombinant silk | | |
| protein | | |

### Example 6: Wash-Off Shampoo Formulation

[0253] A wash-off shampoo formulation was developed that contained a range of silk polypeptide (0.05%, 0.5%, and 1%). These formulas were compared to a placebo—a formulation in which the silk polypeptide was removed and the difference was covered by adding more water. A silicone elastomer version was also made—the silk polypeptide was omitted and replaced with silicone elastomer at 3% loading level (the difference in mass was compensated for by adding less water).

[0254] The shampoo formulation was prepared similar to standard practices outlined in Example 3. For this formulation, a recombinant silk polypeptide in powder form was used, and a silicone elastomer ingredient with approximately 60% solids was used. A list of the ingredients in the formulation (not including the silk polypeptide or silicone elastomer) with a range of loading levels is provided in FIG. 6.

[0255] Viscosity and Rheology was evaluated using the method in Example 3. The viscosity curves of the formulations demonstrated that all formulations displayed a similar shear thinning behavior. FIGS. 9A and 9B demonstrated that over the range of 1-1000 s⁻¹ shear rates, the silk polypeptide samples did not deviate from the placebo by more than 34%. Rheology curves of the formulations demonstrated that, in all cases, the formulations exhibited similar shapes and the G′ dominates over the G″. FIGS. 10A and 10B include a table of the rheology curve data points demonstrated that the over the range of angular frequencies of 0.1 Hz to 10 Hz, the silk polypeptide never deviated from the placebo by more than 31% for G′ and 19% for G″. Inclusion of silk polypeptide as described herein did not significantly change rheology profile compared to the shampoo placebo.

[0256] Light microscopy was evaluated using the method in Example 3. The silk polypeptide can be visually detected at 0.05% loading level.

[0257] For split head evaluation, each side of the head was wetted and two grams of the shampoo sample was massaged into the hair for about 45 seconds. Hair was rinsed for 3 minutes. Hair was combed and then blow dried for 5-10 minutes. The 0.05% silk polypeptide loading level performed similarly to the silicone elastomer sample in terms of style control. As the silk polypeptide concentration increased, the silk polypeptide sample outperformed silicone elastomers for style control.

[0258] SEM images of how the various products deposit on the hair shaft were obtained. Approximately 0.25 g of shampoo was dispersed onto 0.35 g of hair and massaged for about 45 seconds. Hair was then rinsed with DI water for 45 seconds. Hair swatches were dried at ambient temperature/humidity for 24 hours. Samples were evaluated with SEM using the method in Example 3. No significant differences were detected in how the material (silk protein versus silicone elastomer formulation) affects the surface of the hair shaft.

[0259] A list of the ingredients in the formulation (not including the silk polypeptide or silicone elastomer) with a range of loading levels.

### Example 7: Leave-on Skin Serum

[0260] A leave-on skin serum formulation was developed that contained a range of silk polypeptide (0.1%, 0.25%, 0.5% and 0.75%). These formulas were compared to a placebo—a formulation in which the silk polypeptide was removed and the difference was covered by adding more water. A silicone elastomer version was also made—the silk polypeptide was omitted and replaced with silicone elastomer at 0.75% loading level (the difference in mass was compensated for by adding less water).

[0261] The skin serum formulation was prepared similar to standard practices outlined in Example 1. For this formulation, a recombinant silk polypeptide in the powder form was used and a silicone elastomer ingredient with approximately 15% solids was used. A list of the ingredients in the formulation (not including the silk polypeptide or silicone elastomer) with a range of loading levels is provided in FIG. 7.

[0262] Viscosity and Rheology was evaluated using the method in Example 3. Viscosity curves of the formulations demonstrated that all formulations had a similar shear thinning behavior. FIG. 11 is a table of the viscosity curve data points showed that over the range of 1-100 s⁻¹ shear rates, the silk polypeptide samples deviate from the placebo by up to 137%, representing a significant and beneficial increase in viscosity. However the shape of the G′ and G″ curve was observed to remain substantially similar between the compositions of the disclosure and the placebo.

[0263] Light microscopy was evaluated using the method in Example 3. The silk polypeptide can be visually detected at 0.1% loading level.

### Example 8: Leave-on Skin Primer

[0264] A leave-on skin primer formulation was developed that contained 2% silk polypeptide. The formula was compared to a placebo—a formulation in which the silk polypeptide was removed and the difference was covered by adding more water. A silicone elastomer version was also made—the silk polypeptide was omitted and replaced with silicone elastomer at 7.5% loading level (the difference in mass was compensated for by adding less caprylic/capric triglyceride).

[0265] The skin primer formulation was prepared similar to standard practices outlined in Example 1. For this formulation a recombinant silk polypeptide in the powder form was used, and a silicone elastomer ingredient with approximately 15% solids was used.

[0266] Referring to FIGS. 12A and 12B, a the viscosity curve data points showed that over the range of 1-100 s⁻¹ shear rates, the silk polypeptide samples did not deviate from the placebo by more than 35%.

### OTHER EMBODIMENTS

[0267] It is to be understood that the words which have been used are words of description rather than limitation, and that changes may be made within the purview of the appended aspects without departing from the true scope and spirit of the invention in its broader aspects.

[0268] While the present invention has been described at some length and with some particularity with respect to the several described embodiments, it is not intended that it should be limited to any such particulars or embodiments or any particular embodiment, but it is to be construed with references to the appended aspects so as to provide the broadest possible interpretation of such aspects in view of the prior art and, therefore, to effectively encompass the intended scope of the invention.

[0269] All publications, patent applications, patents, and other references mentioned herein are incorporated by reference in their entirety. In case of conflict, the present specification, including definitions, will control. In addition, section headings, the materials, methods, and examples are illustrative only and not intended to be limiting.

### ASPECTS

[0270] 1. A composition comprising recombinant silk polypeptide and a solvent.
[0271] 2. The composition of aspect 1, wherein said composition is a cosmetic or skincare product.
[0272] 3. The composition of any one of the above aspects, wherein said composition comprises less than 30%, less than 20%, less than 10%, less than 5%, less than 4%, less than 3%, less than 2%, less than 1%, less than 0.5%, less than 0.1%, less than 0.05%, less than 0.01%, less than 0.005%, or less than 0.001% silicone elastomer.
[0273] 4. The composition of any one of the above aspects, wherein said composition does not comprise a silicone elastomer.
[0274] 5. The composition of any one of the above aspects, wherein said composition comprises at least 0.1%, at least 0.5%, at least 1%, at least 2%, at least 5%, at least 10%, at least 15%, at least 20%, at least 30%, at least 40%, or at least 50% recombinant silk polypeptide.
[0275] 6. The composition of any one of the above aspects wherein said composition is a cosmetic or skincare product.
[0276] 7. The composition of any one of the above aspects, wherein the recombinant silk polypeptide is greater than 100 amino acids in length.
[0277] 8. The composition of any one of the above aspects, wherein the recombinant silk polypeptide is self-assembled into a semicrystalline state.
[0278] 9. The composition of aspect 8, wherein the crystalline portion of said recombinant silk polypeptide is characterized by beta-sheet crosslinks.
[0279] 10. The composition of any one of the above aspects, wherein said recombinant silk has poor solubility in a solvent selected from the group consisting of: water at a pH from 3 to 8, other polar and non polar solvents (for example, hexanol, hexane, benzene), oils, waxes, surfactants (for example, anionic, non-ionic, cationic, amphoteric).
[0280] 11. The composition of any one of the above aspects, wherein said recombinant silk forms a heterogeneous dispersion in a solvent selected from the group consisting of: water at a pH from 3 to 8, other polar and non polar solvents (hexanol, hexane, benzene), oils, waxes, surfactants (anionic, non-ionic, cationic, amphoteric).
[0281] 12. The composition of any one of aspects 1-7, wherein said recombinant silk polypeptide forms part of a randomly structure gel.
[0282] 13. The composition of aspect 12, wherein said gel comprises preservative agents or chelating agents.
[0283] 14. The composition of any one of aspects 1-7, wherein said recombinant silk polypeptide forms part of a hollow powder.
[0284] 15. The composition of aspect 12, wherein said powder comprises a preservative agent or a chelating agent.
[0285] 16. The composition of any one of aspects 14 and 15, wherein said hollow powder is suspended in a solvent.
[0286] 17. The composition of aspect 16, wherein said solvent is selected from the group consisting of: an aqueous solvent, a polar solvent, a non-polar solvent, an oil solvent, a wax solvent, or a surfactant.
[0287] 18. The composition of any one of aspects 16 and 17, wherein said solvent comprises a preservative agent or a chelating agent.
[0288] 19. The composition of any one of the above aspects, wherein said composition comprises from 0.01 to 0.5% recombinant silk polypeptide, from 0.05% to 5% recombinant silk polypeptide, from 0.5% to 5% recombinant silk polypeptide, from 1% to 5% recombinant silk polypeptide, or from 5% to 20% recombinant silk polypeptide.
[0289] 20. The composition of any one of the above aspects, wherein said recombinant silk polypeptide replaces a silicone elastomer traditionally used with said composition.
[0290] 21. The composition of aspect 20, wherein said recombinant silk polypeptide replaces said silicone elastomer at a silicon elastomer: silk polypeptide ratio from 1:1 to 10:1.
[0291] 22. The composition of any one of the above aspects, wherein said composition comprises a performance characteristic selected from the group consisting of: silky, smooth, and powdery feel; decrease in glossiness on the skin; enhanced shine on the hair; vibrant and efficient pigment delivery; easy spreadability; quick absorption time; mattification; wrinkle blurring effect; hair style retention; heat resistance for hair; UV and pollution defense; and increased viscosity.
[0292] 23. The composition of any one of the above aspects, wherein said recombinant silk polypeptide comprises SEQ ID NO: 2878.
[0293] 24 The composition of any one of the above aspects, wherein said composition is an SPF formulation, a color cosmetic, or a hair serum.
[0294] 25. The composition of any one of aspects 1-24, wherein said composition comprises water.
[0295] 26. The composition of any one of aspects 1-24, wherein said composition comprises water, glycerin, and sodium benzoate.
[0296] 27. The composition of any one of aspects 1-24, wherein said composition comprises: Zinc Oxide, Aloe Barbadensis Leaf Juice, Water, Butyrospermum Parkii (Shea) Nut Extract, Camellia Sinesis (Green Tea) Leaf Extract, Caprylic/Capric Triglyceride, Capryloyl Glycerin/Sebacic Acid Copolymer, Caprylyl/Capryl Glucoside, Cetearyl Alcohol, Cetearyl Glucoside, Coco-caprate/caprylate, Coco-Glucoside, Coconut Alkanes, Diheptyl Succinate, Dipotassium Glycyrrhizate, Ethylhexylglycerin, Glycerin, Hydrolyzed Jojoba Esters, Isostearic Acid, Lecithin, Phenoxyethanol, Polyglyceryl-3 Polyricinoleate, Polyhydroxystearic Acid, Potassium Sorbate, Pyrus Malus (Apple) Fruit Extract, Sclerotium Gum, Sodium Benzoate, Sodium Phytate, Squalane, Tocopherol, Xanthan Gum, or any combination thereof.
[0297] 28. The composition of any one of aspects 1-24, wherein said composition comprises: water, brassica glycerides, caprylic/capric triglyceride, cetearyl alcohol, CI 77491, cucumber extract, gluconolactone, glycerin, glycerl stearate, Helianthus annuus (sunflower) seed wax, hydrogenated polycyclopentadiene, iron oxides, jojoba ester, lithospermum erythorhzon root extract, plyacrylate crosspolymer-y, polyglycerin-3, polyglyceryl-6 polyricinoleate, silica, Simmondsia chinensis (jojoba) seed oil, sodium benzoate, sodium stearoyl glutamate, tocopherol, or any combination thereof.
[0298] 29. The composition of any one of aspects 1-24, wherein said composition comprises: Water, Polyacrylate crosspolymer-6, Glycerin, Citric acid, Gluconolactone, Sodium benzoate, Cetrimonium Chloride, or any combination thereof.
[0299] 30. The composition of any one of the above aspects, wherein the solvent comprises an aqueous solvent, an alcohol, an oil-based solvent, or a silicone.
[0300] 31. The composition of any one of the above aspects, wherein the solvent is selected from the group consisting of: water, glycerin, deionized water, olive oil, and pentylene glycol.
[0301] 32. The composition of any one of the above aspects, wherein the composition cleanses the skin.
[0302] 33. The composition of any one of the above aspects, wherein the composition further comprises a dye.

The application's sequence listing, which the Patent Office published only in electronic form, follows.

SEQUENCE LISTING (2879 sequences)

SEQ ID NO: 1 - DNA, 441 bp, synthetic construct
  misc_feature 1..441: note = Description of Artificial Sequence: Synthetic polynucleotide
  source 1..441: mol_type = other DNA
ggtgcagcgtctgcatctggtgctgcgagcgcctctggtgcagcatccgcgtcagaagcagcaagttcttcctccacaaccataactactaaaggcacttctgcatcgggacttctatcttccccatatggctcggtcagtatttcggttgaaaatagaattatctctttgatatcgtcaatcttgagcgagttcatttctatcgagtccgcttttaactattcctcattcgctaaaaagctggcctttttggcatctgagatctcggtgtccaatccaggtctttctgctagtgaagtcattagtgaggtattgttggagacagtgacagctcttatccacatcttggcaagtagtcaagtgggttcagtctcaacagccgatttgagctctgtttcaagagcctttgctcagtcgttcgcccaggctttcgcacaccaa

SEQ ID NO: 2 - DNA, 540 bp, synthetic construct
  misc_feature 1..540: note = Description of Artificial Sequence: Synthetic polynucleotide
  source 1..540: mol_type = other DNA
ggtgcagcagctacttctagtagtaccactgctgcatcttccgctggctcctcgtcgagtgtatcttcaatttcggcaggtgtgtcctctgatgccggcggcgcctatctatccggagacgtttccgaattcggatccagcggtagtttgccacaagctgtgctcccactgtctcaatggccaggtactggttcttcgggagcagatctattgatatcagatctcctcagtttgagagatggattgctatccagctctgcgtcagagagaatttctgctattattttgccattggtttctgcattatctccgactggagtaaacttctcagagataggtaatattattctttccttaataagtaagataagcggatcatgtgtcggtttatcgccgtctcagaccttttccgaggcattgctggaagttattattgctctaatgcagattttgtcctccgccaaggtcacgacagtatcaacaagtgctagcggaaccgcaagatccttggctcagagtctatcatcagctatggctgga

SEQ ID NO: 3 - DNA, 510 bp, synthetic construct
  misc_feature 1..510: note = Description of Artificial Sequence: Synthetic polynucleotide
  source 1..510: mol_type = other DNA
ggtgctagctccacaactaccacaacggaggctacaggcagtgatgcgtcagcaagaagaatatcgtccggagcatcttccgaaactgccgcgtcatctgtggtagatagttcagtattttccggtgacgtgtcagactactctggtttcaatgtattacctttggtcagcgatctattgtccagttcttcaggattatctagtccagctgccattagacgcatcgactctcttattccattgttgttttcctcagcatcctccaataatttgagtgcatcattcctatccaacgtgttggctactagtgtttctcagatctccgaaggttcatcgggtttatcagctactcagattatcattgaggctttgttcgaactgattagcggactaatgcatattctgacctctgcccactttgacgcagtttcaagggccacatcctcggccacagcctctgcactggccaactcactgtctactgcattttcaggagttaataatatcgca

SEQ ID NO: 4 - DNA, 456 bp, synthetic construct
  misc_feature 1..456: note = Description of Artificial Sequence: Synthetic polynucleotide
  source 1..456: mol_type = other DNA
ggtgcaggtgcaagggctgctggaggctacggtggaggatacggtgccggtgcgggtgcaggagccggcgccgcagcttccgccggagcctccggtggatacggaggtggatatggtggcggagctggtgctggtgccgtagcaggtgcctcagctggaagctacggaggtgctgttaatagactgagttccgcaggtgcagcctctagagtgtcgtccaacgtcgcagccattgcatctgctggtgctgccgctttgcccaacgttatttccaacatctatagtggtgttctttcatctggcgtgtcatcctccgaagcacttattcaggctttgttagaagtaatcagtgctttaattcatgtcttaggatcagcttctatcggcaacgtttcatctgttggtgttaattccgcacttaatgctgtgcaaaacgccgtaggcgcctatgccgga

SEQ ID NO: 5 - DNA, 435 bp, synthetic construct
  misc_feature 1..435: note = Description of Artificial Sequence: Synthetic polynucleotide
  source 1..435: mol_type = other DNA
ggtggacagggtggtcaaggaggttacggaggactaggaccgcagggtgctggcggcgccggtcagggtggatatggcggtggctcattacagtatggcggacaaggccaagcgcaagcggcagcagcttctgccgctgctagcagattgagttccccatcagctgctgcaagagtctcctccgctgtaagcctcgtgtcaaatggaggacctactagtccagctgctctgagttcgtctatttctaatgtagtatctcaaatttccgccagtaacccgggattgagcggatgtgacatattggttcaagctctattggaaattatcagtgcacttgtgcacatactgggctcggccaatattggccctgttaattcatcctcagctggtcaatccgctagcatcgtgggccaaagtgtatacagagcactctca

SEQ ID NO: 6 - DNA, 462 bp, synthetic construct
  misc_feature 1..462: note = Description of Artificial Sequence: Synthetic polynucleotide
  source 1..462: mol_type = other DNA
ggtggttacggaccaggatcgggtcagcaaggaccgggacaacaaggtcctggtcaacaaggcccaggaggtcaaggtccatatggacctggtgcagccagcgcagctgtttctgtcggtggctatggtccccagagctcttccgttccagttgcttccgcagtggcatctagacttagttctcctgccgcgagttctcgagtcagttctgctgtgtcatcattagtatctagcggtccaactaaacacgcagctcttagtaacaccattagctctgtggtaagccaggtatctgctagtaatcccggattatccggatgtgatgtactggtccaggcattgctggaggtggtcagtgcattggtttccatcttgggcagtagtagtatcggtcaaattaactatggtgccagcgcccagtacactcaaatggtaggacagagtgtggctcaggccctagca

SEQ ID NO: 7 - DNA, 402 bp, synthetic construct
  misc_feature 1..402: note = Description of Artificial Sequence: Synthetic polynucleotide
  source 1..402: mol_type = other DNA
ggtagtggaccaggaggatacggccctggctcacaaggtcctagcggtcctggttaccagggtccctcaggtccaggtgcatatggaccttccccatcagcttcagcttcggttgctgcatctgtctacctgagacttcaaccacgtctggaagtatcatccgctgttagtagtctagtatcgagtggtccaacaaatggtgctgcagtaagtggagctctgaactctctagtttctcagatttccgcatcaaacccaggtttgtccggttgtgacgcgctagttcaagctctgcttgaactagtctctgctttggttgcaattctctcttccgcgtcaataggccaggttaacgtttctagcgtctcacaatcaacacagatgatttcgcaggctctgtca

SEQ ID NO: 8 - DNA, 603 bp, synthetic construct
  misc_feature 1..603: note = Description of Artificial Sequence: Synthetic polynucleotide
  source 1..603: mol_type = other DNA
ggtagtgctacctcatcaacaactactactacaaccgtatccaagagtgcagctgctgcagcggctgccgcagccgccgcgtcctccgcttcatctgcttccagagacagcgataggtcctcgagcgcagcaaaagcatacgcatcgtccagtgccaatgcttcttcgaacttcgaaaactaccaaacttctgacctaagcaggccatacgcaacttcctctaacgctccggcatctacgtcaggtatcaagaacgacttatcccctctgatttccggtttaatatcgtctagttctggtttgggttcatctgatgcatccgaccgcatctcatatttgttaacctccttgttgtctgtcattaattcagagggaggaagaatagatttcgcagcggttgcgaacattctcgtaagtttggttagcgagataagagccaagaatagtgaattgtcatacttccacatcttgattgaggcactattcgaggttttgtctgccgttctacaaattatttcttcttctcatatcgttatcggtaatgctagtttttcaagctcttctaacctagcctttgccgatgcatgtgccaaggcattctca

SEQ ID NO: 9 - DNA, 561 bp, synthetic construct
  misc_feature 1..561: note = Description of Artificial Sequence: Synthetic polynucleotide
  source 1..561: mol_type = other DNA
ggttctgctgaggcttcctctgttgcccgtttgagttctgcatcaaatgacgtctatggcccaaccgctgaagaatttggtgcatcaggaagtgcgctcggtgtgtcccagtacggtgaattcggaggattggacgaagtcagtggaccagcacttcagagcactagtccgcccttcctaccactgacctccgacattggtcgcttcagcccagagatttctaggctgctctcgagcccaagcggactcacatccgaggcagctaaggaaagaatatcatccattattgcctctttgctcagcgctaaatcgtctcaagattttaatgccctcttactgtctaacatccttccatccttaatatccaaaattagccaaagagcatccggactttctccaaccgaaatggtgacggaagccctccttgaagtgctagcaggatgtatggaaatcttgtctagctttaatgtgggtgctcagtccattagtagtagtcgtacttcttcaaatgcacttgttcagtctataagtaaccaatttagtggtctgaacgctgctgca

SEQ ID NO: 10 - DNA, 516 bp, synthetic construct
  misc_feature 1..516: note = Description of Artificial Sequence: Synthetic polynucleotide
  source 1..516: mol_type = other DNA
ggtgcttcttccgctgaaagtcgtaccagtgctgctcagtccggaacctcaggttctgcattaggagtcagtctatatggaggcagtggcagcttctatcaaggtaccgcaccggagttgctttctacatcccctgcctcatctcctgtagtgtcagacattggtccagaactgagctctttgctgtctgcacccacaggtctgacttctgaagcagctaaggaaagaatagctagtattattccatcgttactatccgctatttcgccaaacgagttcgacgcagttttattgtctgattccctagcttccttaataagccaaataagtcaatcaggaagcggtcttagtacgtctcagatcgccatggaagctctgttggaggtgttagcaggatgtatggaaatactgtcgagctcgaatgtcggtgccgcctcagtttcttcttctagggcttcatcgaacgccttggtgcagagtatctcaaacgcattcagtggcttaaacgcggccgca

SEQ ID NO: 11 - DNA, 537 bp, synthetic construct
  misc_feature 1..537: note = Description of Artificial Sequence: Synthetic polynucleotide
  source 1..537: mol_type = other DNA
ggtagagccgttgcaagtggagcagccggatctggagcatcatctgccgctagatctggtgcgtctggatctgcatcaggtgtagcgaagtacggaggatacggtggatccagtgatctgagcggcccagccttccctaagattagcccagtctctttgccccatattcctgacggacgtccattcctgccggtaacatctgacctactctcgagtcctgctgatttaactagtccagccgcaaatcaaagaatcacttctataattcccattttgagatcaggtatctcacctaagggattcgatgcatcactgttagccgactccttatcaagtttgatttctgaaatttcacagtctgcttcagagcttagcgcttctgatgtactaaccgaggctctacttgaattagtctccgcgttccttcaaattttaagttccgatgctggtagtgttggtatatcgagttctacagctttctcaaatgctctagctcaatcagtttctaatgctttctatggtctgaacactgttgca

SEQ ID NO: 12 - DNA, 456 bp, synthetic construct
  misc_feature 1..456: note = Description of Artificial Sequence: Synthetic polynucleotide
  source 1..456: mol_type = other DNA
ggtgcaggagttggagctggagttggtgcgggtgcaggtgctggcttcggtgctggcgttggcgccggagtaggagcaggatatggagctggcctgggtgctggatctggagtcggttatggatcaggatcctccattgtttctacttctggaggtgattttagcacaactcttagttcagcttcctcagttttagcaagcccacaaagcgtcacaagggtatccgctttggtccctaaccttatttcaggaggatcttttaattccaacgcagtttcagctgtgctgccaggattgacatctcaaatcaaggctgccacaggttctaatggatgcgactcattcgtgatcgcgttgttggagattgttagcgctttaggccatcttcttaataactctatgatcaacgttaacgccgcaagcgttcctgtgtcccctccacaatggctttactca

SEQ ID NO: 13 - DNA, 531 bp, synthetic construct
  misc_feature 1..531: note = Description of Artificial Sequence: Synthetic polynucleotide
  source 1..531: mol_type = other DNA
ggtgctggagttggcgcaggagccggagcaggagctggtgctggtgtaggtgccggtttcggtgcaggtgttggtgctggcgtcggtgccggagccggtgcaggagttggagctggcgtgggcgctggtgcaggagctggattcggagccggtgttggagccggagtaggagcaggtgtcggtgctggatacggcgccggactgggttcaggcgtcggtgcctccttcggtggcgactttcgtacaacgctgtctagtgcaagtagtgttcttgcaagtcctcagtctctgactagagttaacaccctagttccatcattaatctcaggaggatcatttaatagtaatgctgtttcacgtgccttatccgatcttaactcccaaaatcgcgccgctggtagtacgggttgtgattctactattcaaacattgtttgagatggtttctgctatggaccatatccttaagaactccattatctcagataccgctgcttccgttccagtttcccctccacaatggttatattca

SEQ ID NO: 14 - DNA, 486 bp, synthetic construct
  misc_feature 1..486: note = Description of Artificial Sequence: Synthetic polynucleotide
  source 1..486: mol_type = other DNA
ggtgctagttcctctgctgcggctgcagctgctaccggtggaggtggagccggtggttacggaccaggtataggtggaggctatggtccagcttctccgactggtaccggttccggactgggttccggcgcaggagcagtatcccctgcaagtggaactggtttaggtggatatggaggaggatccttggaatcttctataagtggtctaagttcacaagccagcgccacacgcgtttctagcctgtcctcttcactcacttcaggtggcactcttaatctggccgcgttaccaaatcaactacaacaatccgccagtgaaatatcagttagttccccaggtgcatctagctgtggcacaatggtgcagttactgttggaattgtcatactctctgatctatgccttgagtagtgcatacggtaccgacgcttcttacgttaacgaggcaatgaacaacatattccatattttgaatgcctttcca

SEQ ID NO: 15 - DNA, 408 bp, synthetic construct
  misc_feature 1..408: note = Description of Artificial Sequence: Synthetic polynucleotide
  source 1..408: mol_type = other DNA
ggtgccggaggtgccggtggcggacaaggaggatacggtggtcaaggtggttacggtcagggtacaggagcaggtggagcctcatccgctggtcttagcgtcacagttggaaatatggtttcacgtctgtcgtctccggaagctgcctcgcgcgtatcctccgcggtgtcctccctagttagtaacggccaagtgaacgttgacgcactacctagcataataagtaatttatcttctagtatcagcgcaagtgccactaccgcttcagactgcgaggttttggttcaggtacttcttgaagttgttagtgcattagttcagattgtctgttctgccaacgtcggttacattaatccggaggcatctggctctcttaacgcagtaggttcagccttggcagctatggga

SEQ ID NO: 16 - DNA, 717 bp, synthetic construct
  misc_feature 1..717: note = Description of Artificial Sequence: Synthetic polynucleotide
  source 1..717: mol_type = other DNA
ggtgcttatgcatacgcttacgccattgcaaacgctttcgcctcaatcttggctaatactggactactcagtgtttcttcagctgctagtgtcgcttcatccgttgcctccgccatagcaaccagtgtaagttctagttccgccgctgcagccgcttccgcatccgcagctgcagctgcatcagccggtgctagtgctgccagttctgcatccgcctcttcttcagcaagcgctgccgcaggtgctggagcgggtgctggtgccggagccagcggcgcatccggtgctgctggcggatcaggcggtttcggtctgagttcaggtttcggtgcaggtatcggtggtttgggtggatatccatccggagctcttggaggcttgggaataccatccggtctgctatcttcaggattactatctccagctgccaaccagagaatagcaagtctaattcctttgattttaagtgccatttcacctaacggtgttaacttcggtgtcatcggctccaacattgcatcactagcgagtcaaatctctcaaagtggtggtggtatcgctgcttctcaggcttttactcaagctctcctagaattggtggcagcatttatacaagttctttctagtgcacaaattggtgcagtgtcgtcatcttctgcttctgcaggtgctacggccaatgcattcgctcaatctctgtcctcggcattcgcagga

SEQ ID NO: 17 - DNA, 438 bp, synthetic construct
  misc_feature 1..438: note = Description of Artificial Sequence: Synthetic polynucleotide
  source 1..438: mol_type = other DNA
ggtgcaggagctggtgctggttcaggtgccggtgcgggagcgggtgctggtgccggtagcggtgcctcaacctcggtcagtacatcttcatcgtctgccgctggagctggagccggcgccggaagtggtgcaggagccggctcgggtactggtgcaggcatagccctcccatcaatcgtattgtcacctgctgcatcttctagaatttcttcggtttcttcatctgtacaatctgctggatcgggattgagttttagctcattgagtaatacattatcacaaacagcaagcgctatacgtagctcaaatccacagctgtcctcttctgacgttctcatccaatctttggtcgaaattattgttggactggttcaagcatttactggatcttcagcttcagcgcaaacgttcgtaaactccctgtcacaggtggccgga

SEQ ID NO: 18 - DNA, 552 bp, synthetic construct
  misc_feature 1..552: note = Description of Artificial Sequence: Synthetic polynucleotide
  source 1..552: mol_type = other DNA
ggtcagggaacagatagttcggcttcgagcgtctcgacatcaacttcagttagttcatctgcgacaggacctggttcgagatatcctgtaatggactacggtgctgatcaggctgaagcggcagcctcagctgctgcagcagcagctgccgaagcagctactattgctggactggattacgaaggtcagggacagggcacagattcaggtgcctcatccgtttcttcttctacatcggtaagttcctcagcaacaggtgttacgcagactactatagcgctgcctccagatgtcagtgccagaatttcgttcctcacttcctacttgcagtcagccggttccggattatcactctacactctatctaatttgttgtctcaaaccgctttggccatttctaaatctcgacctgaactgagtccaaacgaggtactgattcaaagtctagcagagattattgtagctcttgtgcaagcattgacaaagcaagctagttcttccgccagtgtgcagtacttcggaagattcaattctttgagtcaggtcgcggga

SEQ ID NO: 19 - DNA, 396 bp, synthetic construct
  misc_feature 1..396: note = Description of Artificial Sequence: Synthetic polynucleotide
  source 1..396: mol_type = other DNA
ggtactgtcgctgagagtggtagtactgctgcctcttcgtcctacgccgcagcggccgcggctagttcctctgctggcagcacatcgtccccgtcgtttctaagtgctgattcactgagttcgtcccttgcttctttaagaatctgttcattctcatccaaattgatgtctagtttgtacagtggagatggtttggacattgctgaattttcagacgcagtgtcatccatggtatccagcattaagtctagcaaccctggagtatcagcttctcagatactgacggaactactgtttgaggtaattgttgcctttgttcaggccttgactaaaagcaaattttccacaatggagacagccgagtcgcttattgctgcttttgctcaagctttcgta

SEQ ID NO: 20 - DNA, 579 bp, synthetic construct
  misc_feature 1..579: note = Description of Artificial Sequence: Synthetic polynucleotide
  source 1..579: mol_type = other DNA
ggtccaaaggaagaacctttgggtgaaagctcagttattgctactagcgtttctgccgcttcttctgttagttctggtggcgctccaggcgtacagggtggaggcccagtgacagtgtcatacagagaaggaccttctcaaattcctagtcaacaaaccttacttcaagccgttcctagcacgcaaagtgttggatccggtgtaccggttggtccgaaccaatatgaaatggtttacgcaccactgcaacagtttggtggtgtttcagcttcaaacttgctttcaccttccgcacactcaagaatcgcatccctgatgtcagacgttctttcattgttttctccaggtaactctggattcaactatggaggattcgcaagggctctttcttcagttgccagagccgtaagccaatctaatgctaagctttcgactactgatgttatcatccaggtccttatggaagcattagtggctttaatagagctgttgtccggtgctaagatcggagtggtccacccagttagagcccaagcgggtgcaagcgcatttgcacaacactttggatctgctttcgga

SEQ ID NO: 21 - DNA, 708 bp, synthetic construct
  misc_feature 1..708: note = Description of Artificial Sequence: Synthetic polynucleotide
  source 1..708: mol_type = other DNA
ggttctttgggataccaactagccctacaaagggctaactctttgggcataccgaatgccgcttctgtggctggcgcagtagctgaagcggtttctgcagtgggtgtcggagctagctcatacgcttatgcctctgcaatttcaaacgcagttggtccgttgttgatatcgcagggactgctgtctcagtccaacgcttcagcgttggcgagttctttcgcatcagcatttgcggctagtgctgtaagtagctcgtctagttctggttctacttcacaaacattgggttcatacttattgggaactcgacctgctttatcaagcaggcttggcttgttgaatttgcctagcagtgttgccgtaactagacctgcctttgtgtccttgatatcacctgtgctatcctctgaaaccggtctatcttctgcgtctgcctctagtagagtcaacagtctggccagttctgttgcctcagccatagctagcggccaggccttaagcgctgactctttcgctaagtcgctattgatacaagcctctcagattcagagttcggctccaagttttaaggcagatgacgttgttcatgagtcacttttggaaggtattagtgctcttattcaagtaataaactctagttatggaagcccactatccctaagtaatgcacaaaccgttaatgctggtctggttaattacttcttggta

SEQ ID NO: 22 - DNA, 615 bp, synthetic construct
  misc_feature 1..615: note = Description of Artificial Sequence: Synthetic polynucleotide
  source 1..615: mol_type = other DNA
ggtaatgttggctaccaattgggtctaaaagttgctaattccctaggactaggtaacgctcaggctctggcatcccaaggcattttgaacgcggccaatgcaggatccctagcatcctcttttgccagtgcgcttagcgcttctgcaggctcggtgggaaacaggtcgagcgcgggaccatctgccgtcggactgggaggtgtatcagccgtgccaggatttattagcgctaccccggtggttggaggtccggtgactgttaatggtcaggtactaccggccgccttacagacggctttggcccctgttgtgacatccagcggattggcatcctcagcagcttctgccagagtgagttcgttagcacaaagtatagcatccgcgatctcttcttctggcggtacattatctgtccctatattcttgaatctcttatccagtgcaggcgcacaagcgactgcttcctcatccctctcttcgagtcaagtaacgtctcaagtattattggaaggaattgctgccttgttgcaagtcattaatggtgcccaaattagatccgttaacttagctaatgtgcctaacgttcaacaagcccttgtttctgctctatctgga

SEQ ID NO: 23 - DNA, 714 bp, synthetic construct
  misc_feature 1..714: note = Description of Artificial Sequence: Synthetic polynucleotide
  source 1..714: mol_type = other DNA
ggtaacgttgcgtatcagctaggctttaacgttgcaaacaccttaggattgggcaacgcagccggtctaggtgcagctttaagtcaggccgttagttccgtgggtgtcggagcttcttctgcgacctatgctaacgcagtatcgaatgctgttggtcagttcttggccggtcagggaattttaaatgcggcaaatgcagcatccctggctacttcctttgccaacgctgtgtcatcaagtgcattggcggccgtttcaagaatcagctcgccatcttacggtgcttttgcatctgttccaaaattcgttccaagtaacttgaatgcgggcggagtctccttcggagaacctttcgctgcattatcccaatccgtgccgacagacttacagagcgcccttgctccaattgcttcctcttctggactgggatcttccgctgcctcagccagagtgtctagtttagcgaatagtgtcgcatcagctatttcgtcgtcaggcggatctttgtctgtccctacattcctaaattttctttcctcagtaggagctcaagtttctagctcttcatctttaaattcgtcagaggttacgaacgaggtcttgttggaagcgattgccgctctgctccaagtgctcaacggagcccagataaccagcgtaaatttgagaaacgttccaaacgcccagcaggcacttgttcaagcactatcggga

SEQ ID NO: 24 - DNA, 510 bp, synthetic construct
  misc_feature 1..510: note = Description of Artificial Sequence: Synthetic polynucleotide
  source 1..510: mol_type = other DNA
ggttctctagctagttcttttgctaacgctttatccaactcggctttgagtgtaggatctagagtaagttccccttcttatggagcattgagtccaatagctgctggtccaaactttatatcaactggactgaatgtcggaggtccatttacaaccttgagtcaaagtttgccaacctccctccagacagctttggctccaatcgtatcctcttccggacttggtagttcagcagctacagccagagttcgtagtttggctaatagtatcgctagtgctatcagttcttctggtggttctctgagcgtcccagcctttcttaacctactaagtagtgttggagcccaggtttcgtcatcttcctctcttaattccagtgaagttactaatgaagtactgctggaggctattgccgcactattgcaagtaatcaacggaggtagcattacgagtgttgacctcagaaacgttccaaacgcccaacaggatttggtcaatgctctatccgga

SEQ ID NO: 25 - DNA, 723 bp, synthetic construct
  misc_feature 1..723: note = Description of Artificial Sequence: Synthetic polynucleotide
  source 1..723: mol_type = other DNA
ggtaatgtcggataccaactgggttttaatgtcgctaatacgcttggaatcggaaacgctcctggtctaggaaatgccttatctcaggctgtatccagtgtaggagttggagcttcctcatcagcctatgccaacgctgtttctaatgcggttggtcaattcttagccggtcaaggagttctaaacgctggcaatgctggttcactagctagctcattcgccaacgcactgtctaactcagctctgtcagttggaagtagagttagcagtccatcttacggtgctctatccccaatcgcagctggtccaaatttcatttctacgggattaaatgttggtggtgcttcggttggtggaccgtttgactctcttagccaatccttgcctacctctttgcagactgcactggctcctatcgtctcctcttctggactgggatcaagtgccgctacagcaagggtatcatctctggcaaactccttcgccagcgcaataagctcctcaggtggctcattaagtgtgccaacattcttgaatctgctgagttccgtcggtgcccaagtatcaagttcttcatccctgtcgtcccttgaagtgactaacgaagttttattggaagcgatagccgcactactacaggttattaacggcggttctattaccagcgttgatcttagatacgtacctaacgctcaacaagacctggtaaacgcactctctgga

SEQ ID NO: 26 - DNA, 537 bp, synthetic construct
  misc_feature 1..537: note = Description of Artificial Sequence: Synthetic polynucleotide
  source 1..537: mol_type = other DNA
ggttccctagccagcagttttgcctcagccctgtccaactccgctctatcaattggatcaagggtcagttctcctagctacggagttttcagcccaatagccgccggtccaaatagcatctccacaggtttgaacgttggcggagcttctattggtggtccttttgctactttgtcacaaagtttaccgacttccctgcaaactgctttggctcctatagttagttcctcgggactaggatcttctgcagctactgcaagagtgagttcactcgctaatagtatcgcatcagccatctcctcatcaggtggatctctgagtgtgccaacctttttaaacctactgtcatctattggagcccaagtctcgagttcatcctcattgtcctcctcttctgaagtgactactcaggtcttattggaggctatcgcagctctactgcaggtgattaatggtgcccaaatcacttcagttaacttctccaatgtctccaacgtcaatagagcattggtagattctttggttggatccttcgca

SEQ ID NO: 27 - DNA, 603 bp, synthetic construct
  misc_feature 1..603: note = Description of Artificial Sequence: Synthetic polynucleotide
  source 1..603: mol_type = other DNA
ggttcggcaacctcatccactaccaccaccacaactgtttcaaagtcggccgcggcggccgcagctgccgccgccgctgctagttcagcgagttcggcttccagagatagtgacagatcaagttccgccgctaaagcgtatgcctcttcctcagcaaatgcttcttcaaatttcgagaactaccagacctctgatctctctagaccctacgccacttcgagcaacgctcctgcatctacctcgggcatcaagaacgacttgtctcctttgatctcaggattgatctcctctagctctggtcttggctcttcagacgcctcagatagaatatcatacttattaacatccctactgtcagttataaactcagaaggtggtaggattgacttcgctgccgttgcgaatattcttgttagtctcgttagtgagatcagagccaagaattccgaactttcttactttcacattttgatcgaggcactgttcgaggtactcagcgccgtattacagatcatttcttcatctcatatagttataggaaacgcatcgttctccagcagctcaaacctggcattcgccgatgcatgtgcaaaggctttttca

SEQ ID NO: 28 - DNA, 807 bp, synthetic construct
  misc_feature 1..807: note = Description of Artificial Sequence: Synthetic polynucleotide
  source 1..807: mol_type = other DNA
ggttcttttgcttctgctagcgcttacgctttcgcttttgccagtgcattttctcaggttctttccaactacggtctgctgaacataaacaatgcttattcattggcatctagcattgccaatgctgcctcaacttcagcttcctcagccgctgccgcagccgtagtagcatctagttcaagtgctgccaccgcagctggtgcagcatccacatctgtcccagcaacaagtttgtccagtgccactagagtcggtggttctttgtcctctgctgtttcacctgcctccgcaaggacggccacaggtgatggtacaacgtacttgccagtccagattcagccaggaatcggtttcgtcccaagtctgtctggagatattggaccaaacgtcccaggatccggaggatttggatcccccgctttacctagtccagtgtatggacctgcaatcctgggcccaggactcgttgcacctgccctggcaaatttgctaccacctttgtccgttcttcctagtgattctgccaacgaaaggatatcatcggttgtttcttctctgttgtcagccatttctagcaacggactggacgcatcctcattaggtggaacgattgcctccctcgtaagtcaaatctctgtttcaaatgccaaactttcatctagccaagtgttcttggaagccctactcgaagtgctttctggaatggtccagatcctcagctacgctgaggttggcgctgttaataccgataccgtaatctcaactagttcagctgttgctcaggccatatcgagcgcggtttccgga

SEQ ID NO: 29 - DNA, 660 bp, synthetic construct
  misc_feature 1..660: note = Description of Artificial Sequence: Synthetic polynucleotide
  source 1..660: mol_type = other DNA
ggtgcttctgcatcagcctacgcctcagcttttggctctgctattggacaatacttggcgggtatcggtatcatttcccaatccaatgcaagtgctctagctagttccttcgcatcagctatctcaagtgctgcgggctcactttcactgggtggtccattcggtgtatccggattgggtattggtggtttgccagttggagtctcgcctgtcggagtcgtcggtccagcaggagtctacggtccggcaggtctttacggacctggagtggtgggttccttaggaccagttacaccattgaacgtaatatatccttctttaacaacctcgattgccccaattattgtgggacctgccggactgagttcggcagcagctacttctagggcttcgtcccttgcttctagtgtcgcatcggccattagcagtgcaggatcggcaggtggtgtggatgtgggactgtttgcttctggattatcaagtctagtaagtcagattcagtcatctaatttaggtctgcagccggaccaggtgctgctagaggctttactggagggatactcggctctagcccaggttcttatttcaagccagatttcgtctgtttctgtctcatcatcatccgcactaggtccagcgttgttgaattacttggtcgga

SEQ ID NO: 30 - DNA, 537 bp, synthetic construct
  misc_feature 1..537: note = Description of Artificial Sequence: Synthetic polynucleotide
  source 1..537: mol_type = other DNA
ggtattctgacgcaggagaacgcctcttcacttgcgtcgtcagtagctaatgctctcagtgcttcatctctgttggttccatctgctataagcaccggtgtacctggactaattgttggtccgtctattgtatcctctttgaacgccccaatagcaggtttcgcagtcccgggcgtagcccaggtcattgtccccacagcctattccaccttactagcaccagtattatccccagccggattggcgtctacagctgctacttccagaatcaacgatattgctcagagcctttcatcgaccctctcaagcggatcacaattggcgcctgacaacgtcctacctggtctaatacaattgagcagttctattcagtcaggaaatcctgacttggatcctgctggagttctcattgaaagtttgttagagtacactagcgccttgcttgctctgctgcagaatgcccaaatcacaacatacgatgccgctacgttgccggcattcaacactgcactagtgaattatctcgtgccactcgta

SEQ ID NO: 31 - DNA, 567 bp, synthetic construct
  misc_feature 1..567: note = Description of Artificial Sequence: Synthetic polynucleotide
  source 1..567: mol_type = other DNA
ggtgttttgaacgccgtcaacgcatcatcactgggttcggccctagccaacgcactgtcggactctgctgcaaactcagccgtaagtggaaactacttgggagtatctcagaatttcggaagaattgccccggtaaccggaggaacggccggaatttcagtgggtgtgcctggctatcttcgaacaccaagctcaactatccttgcccctagtaacgcccaaattatttcacttggtttacaaactaccttagctccagttctgtcgagttccggtttatcttcagcgtctgcatcggctagggtgtcctctcttgcccaatctctcgcctctgccttgagcacatccagaggtactttaagtttatcgacatttttgaatttattatcatccatttcgtctgagatcagagcttccacatctctggacggtactcaggcaaccgtagaagtgttgttggaagcactggctgcactactgcaagtgataaacggtgcccagattactgatgtcaacgtctcttcggttccaagcgtcaatgctgcgctcgtttccgcacttgtagca

SEQ ID NO: 32 - DNA, 696 bp, synthetic construct
  misc_feature 1..696: note = Description of Artificial Sequence: Synthetic polynucleotide
  source 1..696: mol_type = other DNA
ggtatcgccagtgatacggcgctcgccggtgcactggctcaagctgtcgctggcgttggtgctggagcctctgcttctacatatgccaatgttattgccagggcggctggacagttccttgcaacccagggtgtcctaaatgccggcaacgcatccgcattgggatccgccctcgcaaacgctcttagtgacagtgcagccaactcagccgttagtggaaactatgtgggcgcctcccagaatttcggaagaatcgcacccgtcactggaggaactgccggtatatcggttggagttcctggtttcttaagaacaccagcttctaccattttagtcccttcaaatgctcagatcatctcacctagcttacagacaactctggcacctgttctctcttccagtggactgagttcggcctcagcgtcagcacgtgtcggatccctggcacagtccttggcatcggcactctcaacatcgagaggaactttgtcattgtctaccttcctgaacttgttatcaccgattagctcggagattagagcaaatacgtctttggatggcacgcaggcaaccgtggaagctttgttggaggctctagccgctcttttgcaagttataaatggagcccagattactgatgttaatgtttctagcgtaccatcggtaaacgctgcgttggctagtgctttggttgca

SEQ ID NO: 33 - DNA, 630 bp, synthetic construct
  misc_feature 1..630: note = Description of Artificial Sequence: Synthetic polynucleotide
  source 1..630: mol_type = other DNA
ggtgccactgctgcttcctacggaaatgccttgtctacagccgccggacaattttttgctgcccaaggactactaaatgctggtaatgtatcgagtctggcttccgccttagcgaatgctctcagctatagcgctgctaattccgccgcttctggtaattacattggagtttcacaaaattttggtagcattgctccggtcgctggtacagctggtatctcagttggagtaccaggcctattgcccacatctgccggcacggtgctcgctccagcaaatgcgcaaattattgcgccaggcttacaaacaactctagcaccagtcttttcaagtagtggtttgtcatctgcctccgctaatgcaagagtctcctcactggcacagtcgtttgcttctgctttgagtgcttcacgcggaacgttgagtgtatctacttttctaaccttattatccccaatttcatcacaaattagagcaaacacaagtctagatggaactcaagcaactgtgcaagttttgcttgaggctctggccgccttgctccaagttattaatgcagctcagattaccgaagtcaatgtgagtaacgtatctagcgccaatgctgcgttggtttcagcactggctgga

SEQ ID NO: 34 - DNA, 582 bp, synthetic construct
  misc_feature 1..582: note = Description of Artificial Sequence: Synthetic polynucleotide
  source 1..582: mol_type = other DNA
ggtcaatttcttgccaatcagggcatcctgaacacaggtaatgctagttcactggcatcatcgtttagtaatgctttaagttcaagtgctgctaatagtgtcggatcaggattgttgctgggtccaagtcaatacgttggttctattgcacctagtattggtggtgctgccggtatctccatagctggacctggaatcctttcctacttgccaccagtttctccactgaatgctcagatcatatcgtcaggtcttttagcctcgctcgcaccggtgctgagttcttcaggtttggcttccagctcggctacctcaagggtcggttctctggctcaatcccttgccagtgcattacagtcgtccggcggaactctcgatgtatctactttcctgaatttgttatcaccaatttctacccagatacaagctaatacctcattgaatgcctctcaagccatagtccaagttttgttggaagccgtggcggcattattgcaaattatcaatggtgcacaaataacgtctgttaatttcggatcggttagttcagtaaacactgcattggccaccgcattggctgga

SEQ ID NO: 35 - DNA, 951 bp, synthetic construct
  misc_feature 1..951: note = Description of Artificial Sequence: Synthetic polynucleotide
  source 1..951: mol_type = other DNA
ggtagtcagtcagcttcacaggctgccgcatcatcgagtgcttctgccagcgcttctgcaagtgcattcgctcaatctgcttctctggcactggctagctctagctcattcgcctcagcaatttcctcagtctccagtgtaagttccctaggatctttgggctatcaggtaggtttgcaagcagccggcagtctgggcatcagtaactcgcaggctttcgcttcctctatctcacaagctcttacatcagtgggtgtcggagctagttccgccgcatacgcttccgcagttagtggtgtcgtcgcccaataccttagcggcaccggagtcctttcatccgccaatgcccaggctttggcctctagttttgccaacgtttttgctgctagcgctgcttctgcatcagctgcaacctccgcctcctcttctgcctcagctcagagcgcagcagcagcattaacgcagaaccaatccgctgcctctgctttcagccaggcagctagtcaagctggttcacaagccagttctcaagccggaagtcaagttgccagccaatctgctagtggtctgggtgctttcggttttggtactagtgcatctggcattataacgagctctccatctttggctaatctggtttcgaacgtcgctccgatactcctgtcctctaacggtttgagctcttcttcagcaagttcgagaataaattccattgcatcaggtctttcaactgccttatcgagctcgagaggcgtgtctctcgagaatttgtcctcatccttatcatctgtatttagcgagatccaaaacaattctttcggtgtctccgcagaacaagccttgatacaagcattgtttgaggtattaacaggtaccgtacaagtgcttaataggggtcagacatcgtttgtttccgtatcttcccctacagttataagctcatcgttctca

SEQ ID NO: 36 - DNA, 657 bp, synthetic construct
  misc_feature 1..657: note = Description of Artificial Sequence: Synthetic polynucleotide
  source 1..657: mol_type = other DNA
ggtgctgccgctactgccggagcgggagcctccgtagcaggaggatatggcggcggtgcaggtgcagctgctggagcaggcgcaggtggatatggcggtggatatggtgctgtagctggttcaggcgctggtgcagccgccgccgcttcttcgggagctggtggtgccgctggatatggtcgtggctacggcgccggttctggtgctggagctggcgcaggtactgtagctgcatacggaggtgctggtggagttgccacctcatcatcttctgctaccgcctcaggtagcagaatcgttacctctggtggatacggttatggtacttcagctgcagcaggtgccggcgttgccgcaggaagttatgcaggcgctgtcaaccgattgagctctgctgaagctgcttctcgagtttcctccaatatagctgctattgcatccggtggagctagcgcactgccaagcgttatatctaacatctacagcggcgtcgttgctagtggtgtaagctctaatgaggccctgattcaagctttgcttgagttattatctgcattggttcacgtattatcgtcggcttcgatcggtaatgtatcttcagtaggtgtggactcaactctcaatgtagtgcaggacagtgttggacaatatgttgga

SEQ ID NO: 37 - DNA, 489 bp, synthetic construct
  misc_feature 1..489: note = Description of Artificial Sequence: Synthetic polynucleotide
  source 1..489: mol_type = other DNA
ggtgcttatggtggaggatatggaggaggagctgcagttggtcgtggtattacctacggttcagcaagcagttccgccacatcgtcctcaactgcaacttcttccggttctacggccttaactagtgctggatacggaagcggagttggtgtctcagctggagccggagccggcgcagccagcgctggaggttcttactctggatcagtttcaagactttcttccgcagaagcagtgtctcgtgtttcttccaatattggtgctattgcttccggtggtgccagtgcattaccgggagttattagtaatatcttctcgggtgtctccgcatccgctggctcctacgaagaggctgtcattcaaagtctattggaggtgttgtctgcgttactgcacatcctctccaacagctcaattggttacgttggagcggatggcctaacagacagcctagctgttgtgcagcaagctatgggtcctgtagttgga

SEQ ID NO: 38 - DNA, 396 bp, synthetic construct
  misc_feature 1..396: note = Description of Artificial Sequence: Synthetic polynucleotide
  source 1..396: mol_type = other DNA
ggtgcaggaagcggttctcagggagttggttctggatccaattatggtcaattctcttcacaggacgtctcaggtgctgtcttagcttccacgtctagattggcatcaggtcaggccacggaccgagttaaagatgttgtcagcaccttggtgtcaaacggcattaatggcgacgctttaagcaacgccatttcaaatgttatgacacaggttaacgctgctgtcccaggactttcgttttgtgagaggttgattcaagtgctacttgaaatcgtggctgccttggtacatatcttgtctagcagcaatgtcggatcaatcgactacggctccacatcaagaactgccattggagtttccaatgcattggcttccgctgtggcgggtgccttctca

SEQ ID NO: 39 - DNA, 540 bp, synthetic construct
  misc_feature 1..540: note = Description of Artificial Sequence: Synthetic polynucleotide
  source 1..540: mol_type = other DNA
ggttcaggttcagcctcagtctctactggcggctacggacaaagccaagttgccagagcatcctcttcgagcgccgtaggaaccagctcttccgtctccacatctggcagctctggatatagccaggtcagtggtggatacggacagtcatccgccgtgggacaagcatctgctggttacggtcaaatgcagtcaggagttgctgtttccggtggttctgctagcgctacaatttcaagtgcagctagccgtttgagttctccaagctcttctagtagaatcagctccgcagcttcttcgctggctaccggaggtgtcttgaattccgctgccctaccaagtgtcgtcagtaatattatgtcccaagtttccgcttcaagtccgggtatgtcctcttctgaagtcgtgattcaagccttgttggaattagtgtctagtttgattcatatcttgtcctcagctaacataggacaagtagactttaacagtgtgggaaacaccgcagccgttgtgggtcagagtttaggcgccgccctagga

SEQ ID NO: 40 - DNA, 438 bp, synthetic construct
  misc_feature 1..438: note = Description of Artificial Sequence: Synthetic polynucleotide
  source 1..438: mol_type = other DNA
ggttatggctcctcatcttcagtgagctccagttcctctgccgccagttctagcacatccggtgtcgtaacatcaggtggttacggctatggtgccggtgcagcagcaggagcgggagctggcgcaggtgcgtcagccggctcttattctggtgctgttaacaggctcagttcagctgaagctgcttcgagagtatcttccaacgtagctgctttggctagcggaggtccagcagccttagccaacgtcatgggtaatatttacagcggagtcgcttcttcaggagtttcttccggtgaggctttagtacaagctttgcttgaagtcatcagcgctctagtccacctgctgtccaatgcgtcaattggtaatgtctcttcggctggtctaggtaacacaatgagcctcgttcaaagcacggttggagcttatgctgga

SEQ ID NO: 41 - DNA, 450 bp, synthetic construct
  misc_feature 1..450: note = Description of Artificial Sequence: Synthetic polynucleotide
  source 1..450: mol_type = other DNA
ggtgctggtgcgggtgcaaccggcggatatggacggggagccggtgctggtgcaacgaacgcaggcggttatggtggtcaaggtggttacggagctggagccagagccttcgcaggtgcgggagtgggcgttggaacaaccgtagcaagtacaacttcaagattgtccactgccgaagcttcgtcacgtatctctacagctgcctccacgctagtttctggaggttacttgaacactgctgctctaccttctgttatcgcggatctttttgctcaagtcggagcttcctcgcctggagtgagcgattcagaagttttaattcaggttttgcttgagattgtctccagcctaattcacatcctatcttccagttccgttggacaagtcgatttcagttctgttggtagttctgctgcagcagtaggtcaatcaatgcaagtcgttatggga

SEQ ID NO: 42 - DNA, 480 bp, synthetic construct
  misc_feature 1..480: note = Description of Artificial Sequence: Synthetic polynucleotide
  source 1..480: mol_type = other DNA
ggtgccggtgcaggacgcggaggttacggtcgcggagctggagcgggcggttatggtggacaaggaggctacggtgcaggtgctggagccggtgcggccgccgctgccggagctggtgccggtggttacggagataaagagatagcctgttggtcaagatgtcgctataccgttgcttctactacttctcgactttcttctgcagaagcttcgagcagaatttcttctgccgcatcgacattagtcagtggtggttaccttaacactgcagctttgccttccgttatctctgatttattcgcccaagtcggagcatcgtcaccaggagtatcagattccgaagttttgatccaggttctattggaaatcgtatcctccttgatacatattttatcctcatcttctgttggacaagttgacttcagctcggttggtagtagcgctgctgctgttggccaatcaatgcaagtagttatggga

SEQ ID NO: 43 - DNA, 624 bp, synthetic construct
  misc_feature 1..624: note = Description of Artificial Sequence: Synthetic polynucleotide
  source 1..624: mol_type = other DNA
ggtgcaggagcaggaggcaccggaggatatggtcgaggttccggcgcaggtgctgctgctggagctgcagcaggagccggagccgcaggaggatacggaggttatggagcaggagcgggtgctggagctggtggagccagaggttacggaggaggagctggcgccggcgccggagctgctgcgggtggttatggcagaagggcgggtggatcgattgttggtacgggaattagtgcaatttcctcaggcaccggaagttcttattccgtctcctcaggtggttacgcttctgcaggcgtaggagtcggatccacggttgccagcacaacctcacgcttatcgtcagcccaagcctcaagtcgtatcagcgctgcagcctcgactcttatttccggtggttaccttaacactagtgcccttccttccgtcatttccgatttatttgcccaagtatccgcaagctctcctggtgtatctgactccgaagttctaattcaggtcctgcttgagatcgtaagctccctgatccatattctgtcgtcgagctcagtcggacaagtagacttcaactccgtcggatcttcagctgctgccgtcggacagtctatgcaggttgtcatggga

SEQ ID NO: 44 - DNA, 651 bp, synthetic construct
  misc_feature 1..651: note = Description of Artificial Sequence: Synthetic polynucleotide
  source 1..651: mol_type = other DNA
ggtgcaggagctggtggtggctacggaggaggttactctgcaggcggaggtgccggtgctggcagtggagctgctgcaggtgctggcgccggaagaggtggagctggcggctattccgctggagctggtacaggtgctggtgctgccgctggtgctggtacagctggtggatattcaggaggttacggtgctggcgcttcaagctcagctggttcttcctttatctctagttcgtccatgtctagttcccaagccactggttactcttcctctagcggctatggtggtggtgccgcgtctgccgcagctggagccggtgcagctgctggtggatatggtggtggttatggtgctggagccggcgctggtgccgcagctgcatctggcgctacaggtagggttgccaattctttaggtgcaatggccagtggaggtattaatgcattacctggagtgttttcaaatatctttagtcaagtttctgctgcctctggaggtgcatctggtggtgcagtattggtccaagcactaacagaagttatcgcattattgttacatattttatccagtgcttccattggaaacgtgtctagccaaggactggaaggatccatggccatagctcaacaagcaatcggagcgtacgctgga

SEQ ID NO: 45 - DNA, 564 bp, synthetic construct
  misc_feature 1..564: note = Description of Artificial Sequence: Synthetic polynucleotide
  source 1..564: mol_type = other DNA
ggtgctgcctcttcccaagtcgtgtctaggaccactactacaacctcacaaagcgctgccggcggagctgcctctggttactctactggtgtaggaagtggtgctgccgcagccacctccggtgcaggttacggaggacaacgaggatacggtaccggagccggagccgcagctggagcagccgcttctggtacaggtgctggttacggtggacaagcaggctacggtcaaggtgcaggcgcatccgcagcagctgcagcctcagcggcatctaatagaattgttagtgccccagcggtgaacagaatgtctgctgcatcgtccactcttgtttccaatggcgcttttaatgtaggtgctttgggatcgaccatttccgatatggccgcccagattcaggctggaagtcagggtttgtctagcgctgaagctactgttcaagccctactcgaggtaattagcgtactgacacacatgttgtcaagcgccaatataggatatgttgatttcagtagagtcggtgatagcgctagtgctgtttcccaatcaatggcctacgccgga

SEQ ID NO: 46 - DNA, 495 bp, synthetic construct
  misc_feature 1..495: note = Description of Artificial Sequence: Synthetic polynucleotide
  source 1..495: mol_type = other DNA
ggtggcccgggtggtccaggaggacctagaggagcttatgttccaggtgctggtggtttttccggcgtttcctcgggtgcgggtggtgtcagaggaggttccgtaatgccctccggtggatccggatctgcaggtccagtcactatcgtcgagaatattacagtaggtggaggtccatcgggaggttcgggtggagctgccggcggacaaacctaccaaacttatggtggtagtagcagactcccctctctagtcaatggattgatgggatccatgcaacctacgggatttaactaccaaaacttcggtaacgttctttctcaatatgctaccggatcgggtacatgtaattccaatgatgtaaatctgttgatggatgccctcatggctgctctacactgtttaagctacggatcaggttctgttccgtcaaccccgacttattctgccatgtcagcctacaaccaatctataagaaggatgttcacatactca

SEQ ID NO: 47 - DNA, 648 bp, synthetic construct
  misc_feature 1..648: note = Description of Artificial Sequence: Synthetic polynucleotide
  source 1..648: mol_type = other DNA
ggtggagctggtggaccaggagcaggtggtgttggtccaggcggcgtaggcccaggtggagtgggacccggaggtatttatggaccaggtggagcaggtggcttgtacggtccaggtgcgggaggagccttcggatctggaggcggtgctggtgcacctggaggtccaggtggtcctggcggcccgggaggacctggtggtttgggcggaggcgttggcggtgccggcactggtggaggtgtcggaccaggagtcggcggtgttggacctagtggaggagctggaggaacaggtccagtgtcggtgtcgtctaccattacagttggtggaggacagtcgtccggtggagttttgccctctactagttacgccccgacaacatcaggatacgagagactacccaaccttattaatggtatcaaatcttcgatgcagggcggaggattcaactatcagaatttcggtaatattttgtcacagtatgcaactggatctggtacatgtaattactacgacattaatcttttaatggatgctctcttagctgcactacatactcttaactaccagggtgcatcgtatgttccttcttatccatctccatccgaaatgctatcatatactgaaaacgtaagaagatacttctca

SEQ ID NO: 48 - DNA, 498 bp, synthetic construct
  misc_feature 1..498: note = Description of Artificial Sequence: Synthetic polynucleotide
  source 1..498: mol_type = other DNA
ggtggttatggcccaggcggatccggatcaggtggtgtaggcccgggtggttatggacctggtggatcgggtggtttctatggacccggaggaagtgaaggaccctatggtccttcaggcacctacggatctggaggtggatacggccctggaggagctggaggtccatatggaccaggatctccaggtggagcttatggtccaggttcgccaggaggagcttattacccttcctctcgagtccctgatatggtaaacggcattatgagtgccatgcaaggtagtggttttaattaccaaatgtttggaaatatgctttcgcaatatagttccggctctggaacttgtaacccaaataatgtaaatgtgctaatggatgctttattggcagctctgcattgtttatccaaccacggcagctcaagcttcgccccaagtccaactccagctgcaatgtctgcatacagtaatagtgttggacgtatgttcgcatactca

SEQ ID NO: 49 - DNA, 483 bp, synthetic construct
  misc_feature 1..483: note = Description of Artificial Sequence: Synthetic polynucleotide
  source 1..483: mol_type = other DNA
ggtgccggaggatcaggcccaggaggtgccggtcccggaggagctggtccaggtggtgctggacctggaggtgctggtcctggtggagtgggtccaggcggagctggcggaccatatggtagcggaggattcggcttcggaggagccggtggtagtggaggaccttatgtcccaggaggcgcttatggagctggatctggtaccccttcgtattctggctcaagagttcctgacttagttaacggcattatgagatctatgcaaggcagtggatttaactatcagatgtttggtaatatgttgagcaagtacgcctcaggatcaggtgcttgcaattcaaacgatgttaatgtcctaatggatgcattactggctgctttgcactgtctctcatctcatggatcaccgtctttcggctcctctcccactccaagcgccatgaacgcctattcgaattctgtgagaagaatgttccaattttca

SEQ ID NO: 50 - DNA, 624 bp, synthetic construct
  misc_feature 1..624: note = Description of Artificial Sequence: Synthetic polynucleotide
  source 1..624: mol_type = other DNA
ggtggttctggaccaggaggtgccggaggcagcggtcctggaggtgcaggaccgggtggtgtgggtccaggtggatccggaccgggaggtcttggatcaggaggttccggaccaggtggtgtaggtccgggaggttctggtccaggcggagtcggacctggtggttatggacctggaggatcaggaggattatatggacccggatcttacggaccaggcggttctggtgtcccttacggatcttctggaacttatggatccggtggtggttacggacctggaggtgctggtggagcttacggaccgggttcgcctggaggtgcatacggccctggatcaggaggctcctattacccttccagcagagtaccagacatggttaacggtatcatgtccgctatgcaaggatccggattcaattatcagatgttcggaaacatgttgtcacaatactcctcaggttccggaagctgtaatcctaataatgttaacgtactaatggatgctcttttggctgctcttcattgcctgtctaatcacggttcctccagttttgccccatctccaaccccagccgccatgtctgcgtacagtaactctgttggtcgaatgtttgcatactca

SEQ ID NO: 51 - DNA, 516 bp, synthetic construct
  misc_feature 1..516: note = Description of Artificial Sequence: Synthetic polynucleotide
  source 1..516: mol_type = other DNA
ggtataaacgttgattcagacattggctctgtttccagcttgattttgtccggaagtacattgcagatgaccgcatctggtaaaggttcctaccctggaggagaaagtagtcaattcagtggtttggactctaatatcggcctggttggtacacaggatgttgctataggcgtgagtcaacctgtggatatctctttaaacaatatcctggactcccctcaaggattaaaaagtccacaagcatcttcgcgcattaaccgattatcctcctcggtggttaatgccttaggtcctaacggtctagacattaataactttagcgacggtttgcgcactactctgtcacagttgtcatctagcggactgagtaaaaaggaggctgctatcgaaactttaatggaagccatggttgcccttctgcaagtgcttaactctgcacaggtgaatcaggttgatacaagcagcacagtagttacctctagcagcttggctaaggccctgtcctccttgttttca

SEQ ID NO: 52 - DNA, 510 bp, synthetic construct
  misc_feature 1..510: note = Description of Artificial Sequence: Synthetic polynucleotide
  source 1..510: mol_type = other DNA
ggtggcggagttggatctttcggaggacaaacttcatttggtcaaacctcgggtttgacttcctcagctgcttcgcaatctgacttcactcaagcctcaggatttgtgagttcggcaacaagccaaggcgcgtttggtcagacatccggtatcgcctcttttggcgctggaccaagtacaggacttagtgttagaagcacgttaaactcccctaatggtttgagaagcggttctgccgctgcgagaatctctcaactgacttccagcgtaaggaacgcgataggcccgaacggagtggatgctaacgcactggctagatctctacaggcttcgtttagtagtcttagatcttcaggaatgagttcaagtgatgccaagattgaagttttgttcgaaactatagtcggtctattacaacttttaagcaatacccaaattcgtggagttaatatggctactgctagctcagtggccaacagcgcagcccgatcatttgagcttgttcttgca

SEQ ID NO: 53 - DNA, 477 bp, synthetic construct
  misc_feature 1..477: note = Description of Artificial Sequence: Synthetic polynucleotide
  source 1..477: mol_type = other DNA
ggtgctggatatacaggacctagtggtccatcaacaggtccaagtggataccctggaccactctcaggaggagcatcgtttggttctggacaatcaagttttggtcagacttcagcattctctgcttcgggagcaggccaatcggctggagttagtgtaatttcctcactcaactctcctgtgggcctgagatccgcttcagctgcttcaagactttcacaactgaccagcagtatcactaacgccgtcggtgcaaatggtgtcgatgccaacagcttagccagatctcttcaatccagcttttccgctttgcgatcgtctggtatgtctagttcagacgctaaaatcgaggttttattagagactatagttggtttgttacagttgttatcaaacactcaagtcagaggagtaaatcccgctactgcatcttcagttgcaaacagtgccgctagatcctttgaacttgttttagca

SEQ ID NO: 54 - DNA, 477 bp, synthetic construct
  misc_feature 1..477: note = Description of Artificial Sequence: Synthetic polynucleotide
  source 1..477: mol_type = other DNA
ggttttgcaagagcatataccggtccacaaatatctcaacctgcaccacttggagtgggcccacaagtttcccaaccaaggccactaggtgtagcccctcaaacctccggtgcacgaccatttggaggtgtcactggtccttctgcaggaataagtttgggttccgcattgaatagtcctatcggtcttagatccggtctagcagcagccagaatctcacagctaacaagttctttgggaaacgcaatcacaccttacggtgtggatgctaatgctttagcatcttctttacaagcttcattttcaacattacagtcctcgggtatgtctgcctcagacgccaagattgaggttctgctggaaactattgtcggtttactacagttgttgtccaacacccaaattaggggagttaacatggcgaccgctagctcggttgcttcgtctgcagctaagagtttcgagttagtactttca

SEQ ID NO: 55 - DNA, 639 bp, synthetic construct
  misc_feature 1..639: note = Description of Artificial Sequence: Synthetic polynucleotide
  source 1..639: mol_type = other DNA
ggtgcctctgctgcagatattgccactgcaatcgctgcttctgtcgccactagcctactttcctcgggttatctatcagattcaaatgcttctcaactcggtaattctctggcatcctctatctcttcagttgcattgaacgttgctgctgacttgggtgtctctttaagcgcaagtgcaaatttgtcgagctcacttggtgctagtgcaggtatatcctcctcattcgacgctagttccgcttcttccacatctctatcttcgtcgtcatctctctcttcgcaacaacaagtgacatcaagtgcagctgtatccttaaactccgttataactagtcctgtaggattggcgtccccacaggcctcgtctagagtcaggtatctgtcacaattggctttgaacgctatatcaccgcagggattcaatgtcgaagctttcgtatctcaattgggaacaatcatggcccaagctagagcaatgggtatgtcggcttctgacgctacgatagaaactttactcgaaggtttgcttagcctggtccaagcgttaggctcctgtcaggcaggtagttataatccagcaagatccgcggaagcctcaaacattttcctcagtgctattcagtctacgttgagttca

SEQ ID NO: 56 - DNA, 465 bp, synthetic construct
  misc_feature 1..465: note = Description of Artificial Sequence: Synthetic polynucleotide
  source 1..465: mol_type = other DNA
ggtccaggatacggttatgcagcctattacgcaagttcatatggttacggacctggagttggatctggagcgggagctggatccggttcaggcgctggcagtgcagccggtgccggcagtggtagcggagccggcgcaggtcgagacgtgaccaatactgttgttaactctgtctctagattgtcgtccccttctagttccagcagagtttcatccgcagtttccggattgttaccaaacggaaacttcaacttgggtaacttaccaggtattgtttctaacttgtcctcctctattgcgtcctcaggtttatctggttgcgaaaatcttgtacaagttcttatcgaggtcgtcagcgcactggttcacattctaggttcggctaacatcggtaatattaatatgaatgctgcttccagtactgcagccgccgtaggccaagccattgtcaatggattgtattca

SEQ ID NO: 57 - DNA, 708 bp, synthetic construct
  misc_feature 1..708: note = Description of Artificial Sequence: Synthetic polynucleotide
  source 1..708: mol_type = other DNA
ggtaaagcgatttcctcttctgcagcatccgcagctgcatctgcgtcggctgcttcagctgccgctacagcctcggctgcagcaagctcaagcgcttcaactacaagaacaactggagcaacgtcggcagccggtgatttctcagttgtggccgacgccagcgcagattcctcagtcttagctgatgaagctgctagaggagccgtcggtgccgtgtccggaggcggagccgcctcccgctcggtaggtttgattggatctggtttcccgggatatgtttcttctgctccattctcactcatttcttcagtggcaggtggtggtggaagttctccagtgcctgtctcaccactcgccggaggtttgctaccaccatcaagttatctgtcctccccagcagccgctgagagaattagttcagtgattccacttctattatcaggtattagtccaaatagattagatgcctcgttgcttggcaacactctgggtagcttggtcgcacaagtttctttgaatcgtgcaggattgtcattttcacaaatcattgtagaagcactattggaattgttgtgtggcgttatccagatcttaagtttcgccgaaattactgtagttaacacaggtacattatcgtcaaccagttttgccttggctcaagctatgtctgccgctgtgagaaatacctaccgtttccactcaactgta

SEQ ID NO: 58 - DNA, 486 bp, synthetic construct
  misc_feature 1..486: note = Description of Artificial Sequence: Synthetic polynucleotide
  source 1..486: mol_type = other DNA
ggtggatacggaccaggcagcggacagcaaggacctggtcaacaaggtccaggtcaacagggccctggtcagcaaggtccctacggagccggtgcttcagctgctgcagccgcagctggaggatacggtccaggtagcggacaacagggtccaggtgtgagagtagcagcccctgtggctagtgccgctgcttcccgtctcagttctagcgccgcatcttcaagggtttcttcggcagtctcttcacttgtttcttcaggaccaacaactccagctgctttatccaatacaatatcttcagctgttagccagatttctgcatcaaatcctggactaagcggttgtgacgtgttggttcaagctttgttagaggtcgtttctgctttggttcatatccttggatcttcaagtgtcggtcaaatcaattacggagcatcagcacagtatgcacagatggtgggtcagagcgtaacacaagccttggta

SEQ ID NO: 59 - DNA, 423 bp, synthetic construct
  misc_feature 1..423: note = Description of Artificial Sequence: Synthetic polynucleotide
  source 1..423: mol_type = other DNA
ggtggagccggaggtgctggtcaaggtggtttaggcgctggtggagctggacagggcggttacggcggaggagcctatggaggtcaaggagcagcttcctctgctgctgcagcctctgcagccgctagccgtctctcttcgccttctgccgcaagtagagtctcaagtgcggtttcttcattagttagctccggcggaccaagttcaccagctgccctgtcctcgactatctctaatgtagtctctcagatttcagcttccaatccaggattgtcaggctgtgatgtactagttcaagcattgctggagattgtctcagctctagtccacattctgggaagtgctaacattggtcaagtaaactcgtccgctgcaggacaaagtgcgagtctagtcggacaatctgtctaccaggccctgtca

SEQ ID NO: 60 - DNA, 459 bp, synthetic construct
  misc_feature 1..459: note = Description of Artificial Sequence: Synthetic polynucleotide
  source 1..459: mol_type = other DNA
ggtggttatggaccgggagcaggtcagcaaggaccaggaggtgcgggacaacaaggcccgggaggtcaaggaccttatggaccatctgttgccgcggccgcgtccgctgccggcggatatggacctggtgcaggtcaacaaggtccagtagcatctgctgcagtctctaggttatcttcgccacaagcttcttcgagagtttcctcggctgtttcaagtctagtctcttcaggtccaacaaatcctgctgctttgtctaatgctatgtcctcagttgtctcacaagtttcggcctctaatcctggcttgagtggttgtgacgtactcgtacaagcactattagaaattgtgagtgccctggtccacattctgggttcatcttctataggccaaataaactatgctgcttcttcccaatacgcccaaatggtcggtcaatctgtggctcaagcattggca

SEQ ID NO: 61 - DNA, 498 bp, synthetic construct
  misc_feature 1..498: note = Description of Artificial Sequence: Synthetic polynucleotide
  source 1..498: mol_type = other DNA
ggtggctacggaccaggagccggtcaacaaggcccaggaggtgctggacagcaaggtcctggttcccagggtccaggtggcgctggccagcagggtcctggtggacaaggaccatatggtccctctgcagcagccgccgcaagtgccgccggaggatatggtccaggtgctggtcagcaaggccctgtcgcctcagcagctgcatctagactttcatcccctcaagcatcaagtcgtatttcatcggccgtctcttcactggtttcttcaggtccaactaatcctgctgctctttctaatgccatctctagcatcgtatcgcaggtatcagcttcgaatccaggattatcaggttgtgatgctttagtacaggctttgttagaaatcgtatctgctcttgtacatatcctaggttcttcaagcataggtcaaataaactatgctgcttcaagtcagtacgctcaaatggtcggtcaatctgttacacaagctctagta

SEQ ID NO: 62 - DNA, 447 bp, synthetic construct
  misc_feature 1..447: note = Description of Artificial Sequence: Synthetic polynucleotide
  source 1..447: mol_type = other DNA
ggtggatacggaccaagatatggtcagcaaggtccaggagctggtccatatggaccaggtgctggagctaccgcggctgcagcaggtggttacggaccgggagctggacaacagggtcctagatctcaagcaccagtcgcctcagcagctgctgctcgtttaagctcgccacaggcaggtagtagggttagcagtgccgttagtactttagtctcttctggacctaccaatccggctagtttgtcaaacgctatcggttcagttgtatctcaggtcagtgctagtaacccaggattaccaagttgtgatgttttggtgcaagctctcttggaaattgtttctgctttggtacacatcttgggcagcagctcaataggacaaattaactactctgctagttcccaatacgcgaggttggtcggtcagtccattgcccaagccttggga

SEQ ID NO: 63 - DNA, 420 bp, synthetic construct
  misc_feature 1..420: note = Description of Artificial Sequence: Synthetic polynucleotide
  source 1..420: mol_type = other DNA
ggtggtcaaggaggctatggaggtttgggaagtcaaggtgctggacagggcggatacggtggcggtgcttatggaggccagcaaggtgcagctgcctccgccgcagctgcatcagccgctgccagtagattgtcgtcccctggagccgctagccgagtctcatctgcagtgacttcattggtatcatcaggaggtccaacgaactcagctgctttgtccaacactatatccgacgttgtttcccagatatcagctagtaatccaggattatccggctgtgacgtgttagtccaagcacttttggagatcgtttcagctctggttcacattctgggaagtgcaaatataggtcaagtcaactccagttccgccggtcaatctgccagcttagtgggtcagtctgtataccaagcattatca

SEQ ID NO: 64 - DNA, 363 bp, synthetic construct
  misc_feature 1..363: note = Description of Artificial Sequence: Synthetic polynucleotide
  source 1..363: mol_type = other DNA
ggtggttacggaccaggtgcaggtcaacaaggacctggatcacaagctcccgttgcatcggcagcggcttccagattatcttcaccgcaagcttctagtagagtttcttcggccgttagtacattggtgtccagtggtcccaccaacccagctgccctgtctaatgcaatctcttctgtcgtgtctcaagtttcagcctctaacccaggactctcaggctgtgacgttttagtccaagctctacttgagctcgtcagtgccttggtgcatatcctgggaagtagttctataggacaaataaattatgccgccagcagccaatacgctcagatggttggaaactcagttgctcaggcattggga

SEQ ID NO: 65 - DNA, 489 bp, synthetic construct
  misc_feature 1..489: note = Description of Artificial Sequence: Synthetic polynucleotide
  source 1..489: mol_type = other DNA
ggtggatatggaccaggtgctggtcaacaaggtcctggtagccaaggtccaggctccggtggccagcaaggacctggtggtcaaggaccatatggtccatcagccgccgccgcagcagctgctgccggtggatacggtccaggagcaggacagcaaggtccatcttcacaagccccagtagcttcagctgcagccagtcgattgtctagtccacaggcctctgctagagtaagtagcgctgtaagtaccctcgtgtctagcggtccaacatcccctgccgctctctctaatgccatttcttctgttgtctctcaagtctcagcaagcaatcctggtcttagtggttgtgatgttttagttcaggctctcctggaaattgtgtctgctttggtgcacatattgggtagttcgtccataggtcagataaactacgcagctagtagtcaatacgctcaaatggttggtaactccgttgcgcaagccttagga

SEQ ID NO: 66 - DNA, 513 bp, synthetic construct
  misc_feature 1..513: note = Description of Artificial Sequence: Synthetic polynucleotide
  source 1..513: mol_type = other DNA
ggtggccaaggaggtagaggtggatttggaggtttgtcctcacaaggcgctggaggtgctggtcaaggaggatctggtgccgctgcagccgctgccgccgccggtggagatggtggatctggattaggtgattatggagccggcagaggttacggtgccggcctcggtggagcaggtggtgcaggcgtggccagtgcagctgcttctgctgccgccagtagactgtcatccccaagtgcagctagcagagtcagttctgctgtcacttctttgatatctggtggaggccctactaatccagctgctttatccaacactttcagcaacgtcgtttaccaaatctctgtgtctagtcctggattaagtggttgcgacgttttaatacaggctctactggaacttgtatccgctttggttcatattctcggttcggcaatcattggacaagttaattcctctgcagctggtgaatctgcgagccttgtcggtcaaagtgtataccaggctttttca

SEQ ID NO: 67 - DNA, 531 bp, synthetic construct
  misc_feature 1..531: note = Description of Artificial Sequence: Synthetic polynucleotide
  source 1..531: mol_type = other DNA
ggtggacagggaggccaaggtggctatggcggcttaggatcccagggagccggacagggtggttacggccagggtggagccgctgccgcggctgcgtccgccggaggtcagggtggccaaggtggttacggtggattaggctcccaaggtgctggacaaggtggatacggcggtggagcattttccggtcaacaaggtggtgcagcttctgttgctacggcatctgccgctgcatccagactttcctctcctggagccgcctccagagtcagttctgcagttactagtcttgtttcaagtggaggcccaacaaactctgccgcattatccaatacaattagcaacgttgtaagccaaatttcctcaagcaatccgggtctgtctggatgcgacgtactcgtccaagcacttttggaaattgtctctgcactggtgcacattctaggctccgccaatattggtcaagttaacagttccggagttggtaggtcagcatccattgtgggacaatcgattaatcaagccttttca

SEQ ID NO: 68 - DNA, 366 bp, synthetic construct
  misc_feature 1..366: note = Description of Artificial Sequence: Synthetic polynucleotide
  source 1..366: mol_type = other DNA
ggtccaggatatggaccaggcgcaggacaacagggcccaggatctcaagcacctgttgcttctgccgctgccagtaggttatcgagcccacaggcttcatccagagtgtctagtgccgtttctacacttgtctcatcgggtcctacaaatccagcatctctctctaacgcaatttccagcgttgtgagtcaagtctcttctagcaatcctggattgagtggttgcgacgtcttagtgcaagcacttcttgaaatcgtctcagcattggtgcatattctgggttccagttcaatcggtcaaataaactatgctgcttcctcccagtatgcacagttggttggccaatcccttactcaagctttggga

SEQ ID NO: 69 - DNA, 660 bp, synthetic construct
  misc_feature 1..660: note = Description of Artificial Sequence: Synthetic polynucleotide
  source 1..660: mol_type = other DNA
ggtgccgcttctagtgctgctgtgggcgcagctgctacctcgggtgccgccacctctggagctgcaactagcagttcaagtgcgactggcgttggtggatccgtttcttccggagcatctccagcctctgcaggaaccgcaactggaggaggaatttctttcctacctgttcaaactcaaagaggcttcggactagtcccgtcgccaagtggtaacattggagccaatttcccaggatcaggtgaattcggcccttccccattgacttcaccagtttacggaccaggtatcttgggaccaggactggttgttccatcattgcaaggtttgctaccaccattgtttgttttgccttcaaattcagctacggagcgaattagtagtatggtatcaagccttttgtcagcagtctcttctaacggactggatgccagctcctttggtgacactattgcttctttggtttcccagatatccgtcaataactctgatttgtcctcgagtcaggttttgttggaggcactactggaaatattatcaggtatggttcaaatactttcgtacgccgaagtgggaaccgtgaatactaagactgtatccagtaccagcgcagcggtggcccaggctatttccagcgctttttccggaaatcaaaattca

SEQ ID NO: 70 - DNA, 549 bp, synthetic construct
  misc_feature 1..549: note = Description of Artificial Sequence: Synthetic polynucleotide
  source 1..549: mol_type = other DNA
ggttctggcgcagcaagagctgctcagacagcttccgctgcaagtgcagcctctgccagctcaagcttggctcagttgggaagtgccctagcacaatcttcttctttcgctgcagctttcgaccagggtaattccgccgctagtgccgctgctatagcttacgtccttgctcagagtgccgcaaacaaggtgggtttgagttcttatagtgcggctataagcaatgctgcctccgctgcagtcgaatctgttggtggttatgcatccgctagcgctcatgcttttgctttcgcttcggccgtttcacaggttctgtctaactatggattgataaacttgtctaatgctttgtccttggcaagttccatagctaacgctgttagcgcttctgctagttcagctgcagccgtgtctagtgctgcagcagctacaggtgctacctctagtgcagcagtcggagcagccgctacctgtggtgctgcaacatctgcatcaagtgccacgggagttggagaaacagtagcatgtgcaactagcccagcctcaaca

SEQ ID NO: 71 - DNA, 555 bp, synthetic construct
  misc_feature 1..555: note = Description of Artificial Sequence: Synthetic polynucleotide
  source 1..555: mol_type = other DNA
ggtactgcagctggtggtggaatttctagcttacctgtacaaactcagcctggattcggtttcttgttgtctccttctggaaacattggcccatccgttagcggcagcggtggttttggaccttccccattaccatctcctgcctctgatggctttagtccgtccccactcccatcccaagtttatggaccaggaatattgggacctggtttagtagccccttcgctcgaaggtctgttgccaccactgagtatcctaccttctgattcagctaatgagcgtatcagctccgttgtcagttctctcttggctgctgtatctagcaacggtttggatgcaagttcactaggtgataatctcgcaagcttggtttcccagatcagtgctaacaatgctgacctgtccagtagccaagttatggtggaggccttgttggaagtcctaagcggtatagttcagatcttgagctatgccgaagttggtgccgtgaatacagaaaccgtttcgtcaacaagttccgcagttgcccaggcaatatcatctgctgttttagga

SEQ ID NO: 72 - DNA, 528 bp, synthetic construct
  misc_feature 1..528: note = Description of Artificial Sequence: Synthetic polynucleotide
  source 1..528: mol_type = other DNA
ggtagtggaggatatggttcacaaggagcaggccaaggaggccaacagggtcgtggtcaaggtggtcaaggtcaatatggcccaggagagggcgagcaggttccaggccaaggaggtcaaggtccagcagcttctgccgctactgcttcagcaggaggacccggtgaatacggaggtcagcaaggccctggacaaggtggacaacaacaaccaggtcaaggcggacaaggcccatctgctgctgccgctgcctctgctgctgtaggtagcggaggatacggttctcaaggtcaacagggacaaggaggacagggacctactgcttccgcagctgctgctgcagcttctgttgctggtccaggtggttacggcgcttccggacaacagggtcctcgtcaaggatcgcaacaaggaagattcggaccagcagctggacaacaaggaccaggacagacgggacaaatgggcccaggtcagcaaggtccaagcggaccgtcatcggctgccgccgcttccgctgcagccgca

SEQ ID NO: 73 - DNA, 429 bp, synthetic construct
  misc_feature 1..429: note = Description of Artificial Sequence: Synthetic polynucleotide
  source 1..429: mol_type = other DNA
ggtggtccgggcggatacggtggtccaggtcaacaaggtggtggccaacaagccccggtccaaccgcgaccatacgttccaggaatgtcaggtcagatagtgacatcagacgtttcatcaaccgtatccagcgccgtttctagaatgtctactccaggctctggttcgagaatttctaatgcagtgtctaatattcttagttccggagtatcgtcaagtagtggcttaagtaatgtcatcagtaatttgtcctcttcaatttccacatccaatcctggactatctggttgcgacgttctggtacaagttttactggaagttataagtgctctagtacacatcctgagttccgcttctttaggtcaagtgggatcttctccacagaatgcacagatggtcgctgccaacgctgtggcgaacgcattttca

SEQ ID NO: 74 - DNA, 426 bp, synthetic construct
  misc_feature 1..426: note = Description of Artificial Sequence: Synthetic polynucleotide
  source 1..426: mol_type = other DNA
ggtccaggaggctatggaggtcctggtcagcagggtggtggacaacaagcaccagtacagccaagaccatatgttcctgttacaagtggtcaaattgtgacaagtgacgtaagttccacagtttcatcggccgtttccagaatgtcaacccctggatccggatctagaattagcaacgccgtctccaacattttgtcctcaggagtctcatccagttccggattatccaacgctattagtaacattagttccagtatctcggcatctaatcctggactatcgggatgtgatgttcttgttcaagttcttttagaggtaatttcagcactggtacatatattgggctcagcatcagttggtcaggtgggttcatctccacaaaatgcacagatggtcgcagcaaacgctgttgccaatgctttctca

SEQ ID NO: 75 - DNA, 594 bp, synthetic construct
  misc_feature 1..594: note = Description of Artificial Sequence: Synthetic polynucleotide
  source 1..594: mol_type = other DNA
ggtgctggtggtgactctggcctattcttatctagtggagactttggccgcggcggtgcaggagccggagctggtgctgcagccgcttcagctgcagcagctagtgctgcatcggccggtgccggcagaggtacaggttttggagaaagaatactaataggcggttcaagaggattcggtggcgccagggttgatgctcctgcagcatcaactgcttctgcaagtgctgcggctgcgtcctctggcgctggtggcggctctaggtttggtggattaggagtgggagtatttggtgccggatcgggtgaactgagtgttgcttcacgcataagcactatggcttcttctatgtcatcactgttatcctcgaatttctcaccagttattttttcctctcttgctaacgtaattgcaaatggtgcttctgctatagcagtcgctcatccagaattatctggtgcaggcgtgttaacagaagcattactggaagcattggtggccttctgctacgcacatgcgggatcaatcgcctccgcttctgatgtcaacttagcagtgacaacactcgcatctaccatgcaaggttccctgcca

SEQ ID NO: 76 - DNA, 411 bp, synthetic construct
  misc_feature 1..411: note = Description of Artificial Sequence: Synthetic polynucleotide
  source 1..411: mol_type = other DNA
ggttctggacagggtgcgtctttcggaatatcccaacaatttggagctcctagtggagctgcttcctccgcagctgcagctgccgctgccgcggccggagctagctccccaggtgccttgctggtttctgccgatgcaccatccagaatagctagtgtgtcatcatctttaaactccgtcgtctcttctggcgcttctgcatcttctttcgcctccattgcgacccaaatcgctgatgttgcaggtcaagtgtctagtgttcaccctgagctctcatccttggaagtactcgtagaagctctgatcgaaatcattgttgcactagtgcacgcacagtcaggaggagcgtcaagtgcaagtgcgtccgcttcagcatcagctctggccagccaactaggacagcttttcgga

SEQ ID NO: 77 - DNA, 504 bp, synthetic construct
  misc_feature 1..504: note = Description of Artificial Sequence: Synthetic polynucleotide
  source 1..504: mol_type = other DNA
ggtggagctggagccggtcagggtggttacggaggacaaggaggattgggtggttatggacaaggagcgggtgcaggagcaagcgctgcggcttctgcttccggtgctggtagtggtcaaggaggatatggaggacagggtggatacggtcagggaacaggtgcaggtgctgcttcaagcgctggtgtcgcagtaactgttggaaacactgtctctagactatcatccccacaagcggcttctcgtgtttcctcagctgtttcatccttagtatccaacggacaagtcaatgtcgcagcattaccaagtataatttcctctctgtcgtccagcatatctgcttcgtcgactgccgcaagtgactgcgaagtgctggtgcaagttttgctggagattgtctccgctcttgttcagattgtctcaagtgccaatgtcggttacataaatcctgaggcatctggatctctcaacgcagtcggctccgccttagctgctgctatggga

SEQ ID NO: 78 - DNA, 495 bp, synthetic construct
  misc_feature 1..495: note = Description of Artificial Sequence: Synthetic polynucleotide
  source 1..495: mol_type = other DNA
ggtcagggcggtcagggaggttacggacgacagtctcaaggagccggatcggctgcggctgccgcggcagccgcagcagcagctgccgctgcaggaagcggtcaaggcggatatggtggccagggacaaggaggatatggtcaatcttccgcttctgcctcagcagcagcctcggcagcctcgaccgtagccaattcagtctctaggctgtctagcccatcggccgtctccagggtttctagtgctgttagctctttggtatcaaacggccaagttaacatggcggctttacctaacattatatctaatattagctcatctgtctctgcttccgctccgggtgcttcaggctgtgaagtgattgtacaggctttacttgaagtaattactgcactagttcaaattgtctcatcgagttcagttggatatattaacccatcagcagtgaatcagattaccaatgtcgtggctaatgctatggcacaggtcatggga

SEQ ID NO: 79 - DNA, 504 bp, synthetic construct
  misc_feature 1..504: note = Description of Artificial Sequence: Synthetic polynucleotide
  source 1..504: mol_type = other DNA
ggtggtcagggacaaggtggatttggtcagggaaccgttggaaatgccgctgccgcagctgccgctgctgctgcggccgcagccgctcaacaaggaggacagggcggtttcggtggccaaggccagagaggattcggacaacgtgcagcttctgcagtcgcctctgccgcatcggctgcagacgtcggcaataccgtagctaacaccgtttcccgattgagctcaccatctgctgctagtagagtaagttcagcagtggctaacttggtcagtaacggccaactaaatatggccgctttgccatatataataagtaatattagtagttccgtatctgcaagcgttcctggtgcgtcaggttgtgaggtcatcgttcaagctttattggaagtcgtagcagctttatgccaaatcgtttcatcctccaacgttggatacattaatccgtcggccgtgaatgacatcacgaacgttgttgccaacgctatggctcaagttatggga

SEQ ID NO: 80 - DNA, 504 bp, synthetic construct
  misc_feature 1..504: note = Description of Artificial Sequence: Synthetic polynucleotide
  source 1..504: mol_type = other DNA
ggtgagagcggacaaggaggttatggaggtcgtggtcaaggaggatacggacagggagcaggcgcagccgctgctgctgccgtcgctgctgcagccgcagctgccggacaaggtggatttggaggtcttggcggttatggtcaaggtgccggttcagcaaccgctgccgccagctccgctgacgtctccacaactgtcgctaatagtgtatcaagactgagtagtgcttctgcagctagcagagtctactctgttgtatcaaatctggtttcaaacggtcaagtgaacattgctgcgttaccgaacattatctcaaacgtgagtagttcagtttctgcgtcagcaccaggtgcttctggatgtgaagttattgttcaagttttattggaaattgttgctgccctgacttctattgtctcttctgctagtgttggatatatcaatcaatacgctgtaaatgatataaccaacttggttgctaacgcaatggcaggcgttatcgga

SEQ ID NO: 81 - DNA, 342 bp, synthetic construct
  misc_feature 1..342: note = Description of Artificial Sequence: Synthetic polynucleotide
  source 1..342: mol_type = other DNA
ggtggctacggtccaggtagcggtggttctccggcctctggagcagcatcccgcttgtcaagtccacaggctggtgcacgtgtttcatctgctgtgagtgctttagttgcgtccggaccgacatcacctgctgcggtaagttctgctatctccaatgtcgcctcccaaatatctgctagtaaccctggactttcaggttgcgacgtactggttcaagctctgcttgaaattgttagtgccctcgtctccatattgtccagtgcttcgatcggacaaattaattatggagcttcaggacaatacgctgctatgataggccagagtgttgcacaagcattagca

SEQ ID NO: 82 - DNA, 531 bp, synthetic construct
  misc_feature 1..531: note = Description of Artificial Sequence: Synthetic polynucleotide
  source 1..531: mol_type = other DNA
ggtgcttctggagctggtcagggtcaaggctacggacagcaagcacaagtctacaaccaaggtggctccggttctgttgctaccaccgctgccgctgcttcgggtgctgtaggagtgtcgcaaaactatgcgcaggctcccgtttactacggaggttcgagctccagttattcctcgtcaatcactagttactcatccagtgtgttgcctattgctattttgcagtcaccagctggtctaacctcatctgcagctggaagcagaatgtcaagcgtcgcgacctccattacttcacttatcccgagtaacggtagtccattcaactatagcgctttctccaatactttggccagtctgattaacaacattggtaattctaatcctggcttgtccagaaacgatgtgaccatcgaagctttactggaggtcatcactgccctgctacaggtgatctccaacggagaattgtcggctgctgctagctcttacgccgccgcaagcctacttcaaagcatccaacaaggttattca

SEQ ID NO: 83 - DNA, 603 bp, synthetic construct
  misc_feature 1..603: note = Description of Artificial Sequence: Synthetic polynucleotide
  source 1..603: mol_type = other DNA
ggtgcttacggtttcacccaagctgccgcatctgccgttgcttccgttttactgcaagctggtgtcctaaattatggaaacgctactgcactggcatctgcatatgcaagcgcttatgcttcatctgtggcgtccgctgcagcttctgcatcagccggtgcttctgcttcctcgggagcatcagcttacgcatctgctgttgcagcagctgcggctgccgcctctgttagcacctcagcaggcgctagtgcttccgctggagctagtggtctttccttctctcaagctcaagcaagtgccttgtctagttctgctgctgcttacagaattagttctttaattacttcatttgtgtctggtttgtcagcaggtggtggttcagtaaactactcagtgattgccaatgctcttgccagcgtcgcctcacaaatcagtgctagcaacgccggtctgtcagtttcacaagtagcagtccaagctttattagaattctcaactgcgttgattcaaatcttggcatcatcacagattggatacgtaaacactgcatccgctggatctacagcctctgcattttcacaagcactggcacagaccttcgca

SEQ ID NO: 84 - DNA, 498 bp, synthetic construct
  misc_feature 1..498: note = Description of Artificial Sequence: Synthetic polynucleotide
  source 1..498: mol_type = other DNA
ggtggagccggtcagggtggttatggcggactgggaggtcaaggcgcgggacaaggaggattaggaggacaaagagctggtgccgcggctgctgcggccggcggtgctggtcaaggtggctatggaggactaggatcgcaaggtgctggaagaggtggttacggaggcgtcggttccggtgcctccgctgctagcgcagccgcatctcgcttatctagtcctgaagcttcatcgagagttagcagcgctgtatccaacctagtttcctcaggtccaaccaattctgctgccctttcatctaccatctctaacgtcgtatcgcaaattagtgcctcgaatccaggattatccggttgtgatgtgcttgttcaggctttattagaggttgttagtgccctgattcaaatcttgggttcttcatcaattggccaggttaactacggaactgctggccaagctgctcagattgttggccaaagcgtttatcaggcattagga

SEQ ID NO: 85 - DNA, 453 bp, synthetic construct
  misc_feature 1..453: note = Description of Artificial Sequence: Synthetic polynucleotide
  source 1..453: mol_type = other DNA
ggtggagcaggtcaaggaggttatggcggattaggtggacagggagtgggaagaggcggacttggaggacaaggagccggtgccgccgctgcaggcggagcaggccagggtggttatggtggtgtcggcagcggcgcaagtgccgcttccgctgccgcgtctcgcttgagctcacctcaagcttcaagtcgtctatctagtgcagtctcaaaccttgtagctactggacctactaactcagctgcgctgtcgtctacaataagcaacgtcgtatcacaaataggtgcttctaacccaggtctgagtggatgtgacgtattaatacaagccctcttagaggtagtttcagccctaattcaaattttgggaagcagttcaataggacaagtgaattacggttcagctggacaagctacacaaattgtcggtcaatccgtgtaccaggccttagga

SEQ ID NO: 86 - DNA, 492 bp, synthetic construct
  misc_feature 1..492: note = Description of Artificial Sequence: Synthetic polynucleotide
  source 1..492: mol_type = other DNA
ggtccgggaggttacggacctgctcaacaaggcccttcaggtcctggaattgctgcctctgcagcaagcgccggtccaggtggatacggtcctgcacagcaaggaccagctggatatggccctggtagtgctgtcgctgcctccgcgggagccggttctgccggctacggaccaggaagccaagcaagcgctgcggcgagtagactggcctcaccagattccggagcccgtgtcgcttcggccgtgtctaatttggtttccagtggaccaacctcttcggctgccctatcatccgtaataagcaatgcggtttcacaaatcggagcatctaatccaggtttatctggatgtgatgttttgattcaggccttacttgaaattgtatctgcgtgtgttacaatattgtcctcttcgtctataggtcaagttaattacggagctgcttcacagtttgctcaggtcgttggacagtccgttttgtcagcattttca

SEQ ID NO: 87 - DNA, 477 bp, synthetic construct
  misc_feature 1..477: note = Description of Artificial Sequence: Synthetic polynucleotide
  source 1..477: mol_type = other DNA
ggtcctggtggatatggaccagttcaacagggaccttcaggtccaggatccgccgcaggcccaggaggttacggtccagcccagcaaggaccagcacgctatggtcctggatccgcagctgcggccgcagcagctgccggatctgctggatacggcccaggtccacaggctagtgctgccgcttcgagactcgcaagtccagatagcggtgccagagttgcctctgccgtttctaacctggtatcttccggtcctacatcttctgctgcgctttctagtgtgatttcaaacgcagtcagtcagatcggagcttcaaaccctggattaagcggttgtgatgttctgattcaagcccttttggagatcgtttcagcatgcgttaccattttgtcctcctcgagcataggtcaggttaattacggagctgcatcacaatttgcacaggtcgttggacaatctgttttgtctgctttttca

SEQ ID NO: 88 - DNA, 459 bp, synthetic construct
  misc_feature 1..459: note = Description of Artificial Sequence: Synthetic polynucleotide
  source 1..459: mol_type = other DNA
ggtggagctggtcaaggtggctacggtggattgggatctcaaggtgctggaagaggaggttatggcggtcaaggagcaggagcagcagccgctgccacaggcggtgctggccagggaggatacggaggtgtcggctcaggagcatctgccgcatcagctgctgcatcccgactttcatctcctcaagcatcgtcgagagtatcgagtgcagtatcaaatcttgttgcctctggacctactaattctgccgctttgtcgtccactattagtaacgctgtttcgcaaattggtgccagtaacccaggtctttcaggttgtgatgtactgatacaagctttattggaggttgtttctgctttgattcatattttgggtagttcttccattggccaagtaaactacggatcagccggtcaagcaacccaaatagtaggacaatctgtttatcaagccttggga

SEQ ID NO: 89 - DNA, 492 bp, synthetic construct
  misc_feature 1..492: note = Description of Artificial Sequence: Synthetic polynucleotide
  source 1..492: mol_type = other DNA
ggtggagcaggacagggaggttatggaggcttgggaggccaaggatccggtgccgccgccgctggtactggacagggtggatacggcagtctgggtggtcaaggagctggcgcagccggagctgctgcagcagcagttggtggtgccggtcaaggcggatatggcggtgtaggatccgctgctgcctcagctgccgcttcccgtttgtcatcaccagaagcctcatcccgtgtttcgagcgccgtctcaaacttggttagttctggacctacaaattctgctgccttgagcaacaccatcagcaacgtagtgtctcaaatttcatctagcaatcctggactaagcggatgcgacgtcctcgttcaagcactcctggaggttgtgtctgccctcatccacattctgggctcttctagtattggtcaagtgaactatggttcagcaggccaagcgacacagatagtcggtcaatcagtatatcaagctttggga

SEQ ID NO: 90 - DNA, 459 bp, synthetic construct
  misc_feature 1..459: note = Description of Artificial Sequence: Synthetic polynucleotide
  source 1..459: mol_type = other DNA
ggtggagctggccaaggtggatacggtggcctcggttctcaaggcgcaggtagaggaggttatggtggtcaaggagctggagctgcggttgcagccattggaggtgtcggtcaaggcggttacggaggtgtaggatctggtgcttccgctgcttcagccgctgcaagcagactttcttctcctgaagcatcaagtagagtatcttctgctgtttccaatctagtctctagtggtcctactaactctgctgctttaagctctacaatctcgaatgttgtatcccagattggtgcatcaaatcctggtttaagcggttgcgacgtgttgattcaagctctgctggaagtagtctcagccttggttcatatcttaggcagctcttcaattggacaagttaactacggatccgcaggtcaagctacccaaattgttggccagtctgtttatcaagcactggga

SEQ ID NO: 91 - DNA, 426 bp, synthetic construct
  misc_feature 1..426: note = Description of Artificial Sequence: Synthetic polynucleotide
  source 1..426: mol_type = other DNA
ggtggttccggaagaggtggatacggctcacagggtgcaggacaaggagctgcagctgctgcggccggaggtgccggtcaaggaggatacggtggtgcaggttctggagccgctgcagcctctgcagccgcgtctagattgtccagtcctgaagctagctctcgagtctcaagtgcagttagtaacctagtttcttcaggaccgactaactcagctgcgctgtcaaatacaatttcttccgttgttagccaaatatccgcttcaaaccctggtcttagcggatgcgacgtgttggtacaagccctccttgaagtcgtttctgcccttatacacattttgggatcttcatccatcggtcctgttaactacggttctgcgagtcaatccacgcagatagtcggacaatccgtttaccaagcattagga

SEQ ID NO: 92 - DNA, 498 bp, synthetic construct
  misc_feature 1..498: note = Description of Artificial Sequence: Synthetic polynucleotide
  source 1..498: mol_type = other DNA
ggtggctatggaccaggatcaggacaacaaggtcccggtggcgccggtcagcagggccctggaggtcagggaccttatggtcctggaagttcttccgctgcagccgtgggaggatacggaccatccagcggcttgcagggacctgctggtcaaggtccatatggacctggagctgcagcctcagcagctgccgctgctggtgcatctcgtctgtcgagcccgcaagctagttccagagtgagttccgcagtttcaagccttgtctcatccggtccaactaatagtgctgctctgactaacactatttcgagtgtagttagccaaatttcagctagtaacccaggtctatccggttgtgacgtcttaattcaagcactgctcgaaattgtatctgccctagtacacatactaggctacagctccattggacaaatcaattatgacgctgctgcgcagtatgcttctctagtcggtcaatctgttgcacaagccctcgca

SEQ ID NO: 93 - DNA, 537 bp, synthetic construct
  misc_feature 1..537: note = Description of Artificial Sequence: Synthetic polynucleotide
  source 1..537: mol_type = other DNA
ggtgttttgggaggtcaaggaggattgggtggcttgggatcgcaaggtgctggtcagggaggatacggtcaaggaggtgccggacaaggaggtgctgccgcagccgctgctgcagctgcagcaggaggactcggaggacaaggtggtcgaggaggacttggttcacagggtgcaggccagggaggttacggccagggtggtgctggtgcatcttccgcagcagctgcctcggctgctgcatctagattatcttccgcttctgctgcttctagagtttccagcgccgtctcatctttggtatcatccggtggtccaacgaactcagcggcattatcctcaacaatttcaaacgttgtctcccaggtttcagcgtccaatccaggcctttcaggttgtgatgtattggtacaggccttattagaaatcgtctcagctttagttcatattcttggaagttcatctataggacaagttaactataatgcagccggacaatccgcatccgttgtgggacagtcattttatcaagcattggca

SEQ ID NO: 94 - DNA, 690 bp, synthetic construct
  misc_feature 1..690: note = Description of Artificial Sequence: Synthetic polynucleotide
  source 1..690: mol_type = other DNA
ggtactggtcagggcggagtcggtggttacggtcagggtgccggttcgtccgctggtgccggaactggtggtgtcggtcaaggcggatacggatcttatggaagttcctaccaatcaacgagcggtatctctatcgcactctctacacaatcattaggtggacaaggtcagtacggccaaggtttgggagccggagcttccgcaggtgctggagctgccgttggtactggtctaggtcagggaggtctaggtggatacggacagggatccggtagtgcttccgccgctgcgtcgggttcaggttctgccattggtggatttggtggctatggtcaaggagctggcctaggagctggaaccgcagccgacgtaggcgctacggtaagtaatactgtttctagactgtcctccccagctgctaccagcagagtttcatcagcggtcagttcgcttgttgctaatggtgcacctaatttatcatctttaccaaatgtaatcagtagtttatccaactcagtgtccgctagtaccccaggcgcttctggatgtgaaatactggtgcaagtcctgatggaggtcgtcaccgcattggtacagatattatctagtgcaaacgtatcaagcgtgaacgccggtgacccatctcaagccgctatgactgttggtcaatctgtggcagccgctcttgga

SEQ ID NO: 95 - DNA, 624 bp, synthetic construct
  misc_feature 1..624: note = Description of Artificial Sequence: Synthetic polynucleotide
  source 1..624: mol_type = other DNA
ggtgcttcttccaacgcaagttctgctgccgctgcagcttctacagttctagctggcgttgcaccagctggatcatccgcttctagttcagctgcctcagcatcaactggtgccggcgctgctatttcttccgtaggaccagccgttggattcggcgccggtcctgccccagcaggaggtttggtttcaggactaccaggctattcaccactgaatcagggctttacgccatacccgggagtacctttgccaactggatcaggtgtctcagcaccagtgcctgtatctcctctaccactcggtttgttaccttcatcgttggacttgtcatcacctagtgctaccggacgtatgtcatccctcgtacgttcattgctgagtgccgtcagttctggaggattgaactcgagtctcttgggatcaaccctgacttctctggtgtcgcaaatttcctcaagcaggtcggatttgtcggcatctcaagtcctggtggaggccgtgcttgaaatcctatccgctgtaatccaaattctatcaagtgctacaattggtgttgtatctaccgactctgtcggtgctacttcaagtgccgtggcacaagcagtttcttcggcgtttgccgga

SEQ ID NO: 96 - DNA, 426 bp, synthetic construct
  misc_feature 1..426: note = Description of Artificial Sequence: Synthetic polynucleotide
  source 1..426: mol_type = other DNA
ggtggtttgggtggtggacaaggtggatatggatccggactaggaggagttggtcaaggaggccaaggtgcattaggtggtagccgtaacagtgcaactaacgctatatctaattccgctagtaacgcagtatcactactttcatctcctgcatctaatgctagaatctcctccgccgtatctgcattggcgagtggcgccgcctcaggtcctggttacttgagctccgttatctccaacgttgtttcgcaagtttcctcaaatagcggaggcttagtaggatgtgatactttggtccaggcactactcgaagctgcagctgctcttgttcacgttttggcttcttctagtggaggtcaagtaaatctcaatactgccggttatacttcacaaatggtgtcccagaccattgctcaagtctttgca

SEQ ID NO: 97 - DNA, 414 bp, synthetic construct
  misc_feature 1..414: note = Description of Artificial Sequence: Synthetic polynucleotide
  source 1..414: mol_type = other DNA
ggtggcctcggaggtggccaaggaggccaacagggcgctggtagaggtggtctgcaaggtgccggtcagggtggacagggtgccttaggaggatcaagaaactccgctgccaatgcggtttcgagacttagctcgccagcctctaatgccagaatctccagcgctgttagcgctttggcatcaggaggtgcaagctcacctggttatctgtcatcaataatttccaatgtcgtctcccaagtgtcctccaataatgatggtctttccggttgtgataccgtcgtccaggcattgttagaagtcgccgccgcacttgtccacgtcctagcttcaagcaatataggccaagttaatttgaatactgcaggatatacctcgcaaatggtttcgcagaccattgctcaagtgttcgca

SEQ ID NO: 98 - DNA, 411 bp, synthetic construct
  misc_feature 1..411: note = Description of Artificial Sequence: Synthetic polynucleotide
  source 1..411: mol_type = other DNA
ggtggaagcggcggtcaaggtggacagggcggttacggatctggaggacaaggtcaaggacagggtggatatggtagcggtgcggcttctgctgccgcggcagcatcctcatccgtcagccgtctccaatcccctgcttccagctcaagagttagttcggccgtatctactttggcctcagcaggagctgctaactcgggagctttgtccagcgtcatttctaatctgagctcttctgttgccagtgctcaccctgacttgtctggatgcgaattacttgtgcaaattcttcttgaggtgatcagtgccctagtcgcattacttggctcatcaacagtgggacctgtcgatattggtcaaagcagtcagtactctggtctggtcgcaaacgctataggtaatgctctcgca

SEQ ID NO: 99 - DNA, 399 bp, synthetic construct
  misc_feature 1..399: note = Description of Artificial Sequence: Synthetic polynucleotide
  source 1..399: mol_type = other DNA
ggtcctggtcaacaaggtccttatggaccatcccaacagggtccaggtagctacggtccatccggtcaagtttcatccgttagtgcctcagtttcttccgccgctagtagattgtcaagtccagctgcttcctctagagtctcatctactgtctctagcttggcctcatcgggaccgtctgacgccagtgtggtttcaagcgcattaagtaacttagtcagtcaagtatcagctagtcaaccaggtctgtccggatgcgacgtcatcgtgcaggctttgctggaactcgtttccgctttagtccacatcttgggtagttcttctctcggacaagttgactacaacggcgcatcttacagtgctcagaggctgtcccaagcattaggaaacactcttgga

SEQ ID NO: 100 - DNA, 408 bp, synthetic construct
  misc_feature 1..408: note = Description of Artificial Sequence: Synthetic polynucleotide
  source 1..408: mol_type = other DNA
ggttccggagccggtgccggatcagccgctgctgccggtgcgggagttggagctgctggtggatatggaggtggagccggcgctggagctgtagcaggagcctcggcaggttcatacggaggagctgtcaacagactctcatctgcaggagccgcttcccgagtcagctcaaacgttgcagctatagcctcagctggtgcggctgctttaccaaatgttatctctaatatctacagtggtgttttgtcaagtggagtgagttcctccgaggcccttatccaggcattgttagaggtcatttcagcactgatacatgtccttggatcagcttccatcggtaatgtttcttctgttggtgtgaatagtgcattgaacgccgtccaaaatgctgtcggagcctacgctgga

SEQ ID NO: 101 - DNA, 375 bp, synthetic construct
  misc_feature 1..375: note = Description of Artificial Sequence: Synthetic polynucleotide
  source 1..375: mol_type = other DNA
ggtcagggtggatatggtggaagcgcttacggtggccagggcgctactgcttcggctgcggcagcctcagctgctgccagtagattgtcctctccatccgcagcatctagagtttcttccgcagtctcaagccttgtgagcaatggaggtcctacatcaccagcagctttgagctctagcatttccaacgtggtatctcagatctctgcatcaaacccaggactttctggttgtgatatattggttcaagctctattagaaattatttctgcattagtgcatattctaggaagttcatccattggtcaggtaaacagctcgagtgccggacaatctgcctccattgtcggacaaagcgtgtatagggcactgtca

SEQ ID NO: 102 - DNA, 501 bp, synthetic construct
  misc_feature 1..501: note = Description of Artificial Sequence: Synthetic polynucleotide
  source 1..501: mol_type = other DNA
ggtggtccaggtggccctggtggtcgtggaggaccaggacgttcaggtggtagaggaggcctcgaaggtgctggtgcatcgggaggtttcggacctgtagcgggaggagcttcacccggagcaggtggttctggttctactactgtcaccgaagttgttagtgtgaccgtatccggaggacaacctagttcaggcgtgctgccgggtggctcttacacccctgccgccggtggatccgctcgtttaccttccctgataaatggaatcatgtcctctatgcagggtggaggattcaactatcaaaatttcggaaacgtcttatctcagttctccactggtaccggaacgtgtaatagtaatgacttaaacctgctaatggatgcactattagcagcattgcatactctatcgtaccaaggtatgtccactgtcccatcttacccatccccgtctgctatgtctagttattctcagtcagtcaggagatgctttggatattca

SEQ ID NO: 103 - DNA, 363 bp, synthetic construct
  misc_feature 1..363: note = Description of Artificial Sequence: Synthetic polynucleotide
  source 1..363: mol_type = other DNA
ggtgtcggaccgggaggtgcttatggtccaggtgccggaggactgtctggagtgtctagtggtgctggaggaattagaggtggtcaaacctacggaggatcttctagattaccatctttagtgaatggactcatgggatccatgcagccttctggtttcaactatcagaacttcggtaacgttatgtctcaatatgcaactggatctggtacgtgtaacagtaatgacgttaacttactaatggacgccctcatggcagctttacattgcttatcttacggatcaggatcggttccacctacccctacctactcggccatgtccgcttacaatcaatccataagacgaatgttcgcatactca

SEQ ID NO: 104 - DNA, 363 bp, synthetic construct
  misc_feature 1..363: note = Description of Artificial Sequence: Synthetic polynucleotide
  source 1..363: mol_type = other DNA
ggtcagcagggttactcatctagctcaagcgctggcgctagctctgccgcaacggccagcgcagccgcttctagactcagtagtaccgattccagttcacgagtatccagtgctgtatctagcctggtcagtaatggaccttctaacccggtggccttagctaatgctgtttctcgtgttatgtcgcaagtgaatgcttcctcttctggtttatcagaatgcgacgttttggtgcaagctttgctcgaaatcttaagtgccctggtacatatacttggaagcgctactgtcggcgaagttaattacgacgctacatcacaaaccgcacaaatggtcagccagactatagctcaggtattcgca

SEQ ID NO: 105 - DNA, 396 bp, synthetic construct
  misc_feature 1..396: note = Description of Artificial Sequence: Synthetic polynucleotide
  source 1..396: mol_type = other DNA
ggtccaggaccgcagggtccatctggtcctggtccacaaggtccttctcctcaaggaccaagcagtggatatgatcagtcggtcgtaattagctcagcaagttcccgtttgtcatctcctagtgcgacttcccgtatctcttcggcaatttcaacgctaaagacttcgggtcctagaaacccagtgggattgtcaactgccttaggtaatatcctaagccaaattcaattgacaaatcccggtctgtcgggttgcgaatctttagttcaggcccttttagagattgtgtcagctctgatccaaatcttatctgtcagtagtgtaggacctgttgatttctccgctactggacaaagtgccgctatcgtgggacaagctttgatgcaatcactagga

SEQ ID NO: 106 - DNA, 462 bp, synthetic construct
  misc_feature 1..462: note = Description of Artificial Sequence: Synthetic polynucleotide
  source 1..462: mol_type = other DNA
ggtggagcagcaggttccggagttggatacggtggtgcttcaggtgttgttactagttcctcaagcgcttccgcaggaggttcgggtatcataacttatggtggttatggatatggagctggtgctgctgcaggtgccggtgctggtgccgtcgccggttcctatggaggcgcagttaatagacttagttcagctgaagctacgaaccgtgtctcaagcaatgtcggagcaatagttagcggtggcgtgtcagcactaccatcggtaatttcgaacatcttttcaggagtgaatgcatcggctgcaggagccagctatggcgaagcactgattcaatctcttatggaagtggtatcagtgctcctacacattttgtctaattctagtatcggttatgttagtagtgagggtctgggcaattctttaagcgtcgtccaacaagcaattggacctctcgctgga

SEQ ID NO: 107 - DNA, 420 bp, synthetic construct
  misc_feature 1..420: note = Description of Artificial Sequence: Synthetic polynucleotide
  source 1..420: mol_type = other DNA
ggttcgtcatttgcgaatgcagcttccgctgcacccgctgtttcagttgatggtcctgtagttgtctctggtcaagtcctaccggcttctttgttgactgctcttgcaccagttgtgtccagttctggcctagcatcctcaacggcctctgctagagtttccagcttggcacaaagcatagctagtgccattagcagtagtggtggaacactatctgtaccaacctttctcaatttgctctcttcggctggtgcccaagtcactaccagcagtactttgaattcttcacaagttacgtctcaggtattattagagggtatcgccgcccttttgcaagtgatcaacggagcccaaatccgaagcgttaatttggcaaacgccccaaacgttcagcaagcacttgtatcagcattggcggga

SEQ ID NO: 108 - DNA, 591 bp, synthetic construct
  misc_feature 1..591: note = Description of Artificial Sequence: Synthetic polynucleotide
  source 1..591: mol_type = other DNA
ggtcaaggtaccagtttcgctagctccgctaccgccggaatacgaaatatcttcggcaaccctaacactgcaaataattttgtcgactgtttgaagggaggaattcaagcttcacctgcgtttccacgtcaagagcaagccgacattcaatcgattgcctctagcattctgtccgctggtaacaccgcaacgaagtctaaagccatcgagcaagctttgtctactgcccttgcctcgtctctcgcagaaatcgttatcaccgaatccggcggtcaggattactctaagcagattaccgatcttaacggaattttgagtaactgtttcatacaaaccacaggagttgagaacaagaggttcgtgaattcgattcagaaccttatccggttgttggctgaatccgcggtttcagaaactactaacagtatccaaatcggtccatacgcttctacctcgtccaactcattttcagattcgtctgccaatgacgcctctggagcttatgccttctcacaaagttcagcctccacgttagcaagctctagcgcttttagttcagctttttcaagcgcttcctcggcctccgccgta

SEQ ID NO: 109 - DNA, 591 bp, synthetic construct
  misc_feature 1..591: note = Description of Artificial Sequence: Synthetic polynucleotide
  source 1..591: mol_type = other DNA
ggtcaatccgtagctgtcacagctgttccgtcagttttctcttccccgaatttggccagtggctttttgcaatgcctgacctttggtattggaaattctcccgcattcccaacccaggagcaacaagatttggacgctatcgctcaagttatactgaatgctgttagcaccaatactggagctactgcctccgcacgagctcaggctttgtcgacagccttagcctcatctttaacagacttgctgatcgcagaatctgccgagtcaaattacaacaatcaattgtctgaacttaccggaatcctatcaaactgttttatccagacgacaggttccgataaccctgcttttgtgtctagaattcaatctctgatctctgttctgtctcaaaacaccgatgtaaacatcattagcacagcaggtctgccaactgctattagtggagcaggtggtttcggatttgccaagactgcatctagctcagcgagccaagcttcagcgtcgagctttgcacaggcctcgtccgctagtttggcagcttcttcgtcgttctcaagtgcctttagttctgcgaatactttatctgcatta

SEQ ID NO: 110 - DNA, 609 bp, synthetic construct
  misc_feature 1..609: note = Description of Artificial Sequence: Synthetic polynucleotide
  source 1..609: mol_type = other DNA
ggtcaaagtgtagccgtcacagccgtcccttcggttttctctagtccaaacctggcttcaggattcttgcaatgcttgaccttcggtataggaaatagccctgcatttccaactcaggaacaacaagacttagacgcaatcgcccaagttattttgaatgccgtctccagtaacaccggagcaactgctagtgcacgagcgcaagccttgagtacagcattggcctcctctttgaccgacctgcttatcgccgagtctgctgaatcaaactactcaaaccagttgtctgaattgacgggtattttgtctgattgttttatccagactactggtagtgacaaccctgcctttgtgtccagaatacaatccttgatctcagtattgtcccagaacgcagatactaatatcatctcctctgcaggtattccatcagtgagtggccgacggggagccggtggtctaggcttcgataataccgccagacaaagcgcatcatccgccgcttcacaagcttctgctagttcatttgcacaggcttctagcgcatcgttggctgcgtcctcagccttctcatcagctttcagttcagctaattccctgagtgcccta

SEQ ID NO: 111 - DNA, 420 bp, synthetic construct
  misc_feature 1..420: note = Description of Artificial Sequence: Synthetic polynucleotide
  source 1..420: mol_type = other DNA
ggtcaacaatcaaagtttggacaaaggtttccatcagtttcgcacatatggaacaggaagttttctcgtatctcgtactctagaacaactcgtcttggttgtcactgtccaggtgatactcaatgtaggttcaaacaacactggcgtcactcaatcggtcagtcatcaggattcaagtactcagcctgcatcttttcttctgctaattcgcttagcgccctgggtaacgtcgcctatcaactgggttttaacgtagctaatactttgggaataggtaacgccccaggtctgggagctgcattgagtcaagctgttagtagcgttggtgttggcgcttcgagctcgacgtacgcaaatgttgtaagtaacgcagtaggacaatttttggcaggtcaaggagtattgaatgccgccaacgca

SEQ ID NO: 112 - DNA, 756 bp, synthetic construct
  misc_feature 1..756: note = Description of Artificial Sequence: Synthetic polynucleotide
  source 1..756: mol_type = other DNA
ggtctcccagcaaactctctgtctggagtgtcggccagtgttaacatattcaactcccctaacgccgcaacctcgttcttaaattgcctgcgctcaaacatagaatcaagtcctgcgtttccttttcaagagcaagccgacctggatagcattgctgaggttattctatctgatgtgtcctctgtcaacaccgcctcctctgctacttccttggctctgagcaccgctttggctagctcacttgctgaactcctagttacggagtcagctgaagaggacatcgacaaccaggttgtggccttgagtactatcttgtcccagtgtttcgttgaaactacgggatccccaaaccctgctttcgttgcttctgttaagtcactcctgggtgttcttagtcaatctgctagcaattacgagtttgtggaaactgctgatgaatctattgcagcaaacgttccaggcataactacaacaggtaacttcacgccgttaaacgcaattgagcaaaattttgtatcaagcctggcgtcgtctccaagtcttgcgcgtacattctactccgtaagcaacgcagatcaggctgcaaacattgcctataacctaggtcttaacattgctccatctttaggtatcccaaattccgaggcacttgcttcaagcttgcgtcaagctgtggcaagcgcaggtgaaggtgttaattcatcaacttacgctaatcttgtatctaacacattgggtcagttcctgagctcgcaa

SEQ ID NO: 113 - DNA, 720 bp, synthetic construct
  misc_feature 1..720: note = Description of Artificial Sequence: Synthetic polynucleotide
  source 1..720: mol_type = other DNA
ggtcaggctatatcagtcgctacgccagttccctcggttttctcttcgccatctttggcttcaggatttcttggatgtttgactaccggtattggtctttcacctgcattcccttttcaagagcaacaagacttagatgatcttgctaaagtaattctttccgctgtaacttcaaatactgatacatccaagtctgctcgcgcccaggctctttcaaccgctctggcatccagtttggccgatctgctgattagtgagagtagtggatcttcttaccagacacaaatctctgcccttacaaatattctgtccgactgtttcgtgacgactacaggatccaataatcctgctttcgtctctagggttcaaactcttattggtgttttgtcccaatcttcaagcaacgccatatcaggcgctactggtggaagtgctttcgcccaatcccaagctttccaacaatctgctagccaaaacacaggcctttccgcatctcgagccggatctacgtctagcagtaccacaacaacgaccagtgccgcagcttctcaggctgcatcccagagtgcatcgagttcaagctcgtatgcctttgctcaagcagcatcgtccagtctggcaacaagctcagcaatctccagagcatttgcatcggtgagttccgcctcggccgcctctagtttggcgtatacaattggattgtctgccgcaagaagttta

SEQ ID NO: 114 - DNA, 522 bp, synthetic construct
  misc_feature 1..522: note = Description of Artificial Sequence: Synthetic polynucleotide
  source 1..522: mol_type = other DNA
ggtcagccaatctggaccaaccctaatgctgccatgacaatgaccaacaatcttgttcagtgtgcaagtagatcaggagttctgacagcagatcaaatggatgacatgggaatgatggccgactcggttaattcccaaatgcagaaaatgggtccaaaccctcctcaacacagactcagggccatgaacactgcaatggctgcagaagtcgcagaagtggttgcgacctctcctccacagtcttactctgctgtgttgaacacaattggtgcttgcttacgcgagtcgatgatgcaagctactggttcggtggacaacgccttcacaaatgaggtgatgcagctggtgaaaatgctatccgctgattctgctaacgaagtttcgacagcttctgcatctggagcctcgtatgctacttctacatcgtctgctgtatcatcttcccaggccacaggttatagtaccgctgccggatatggcaatgcggctggtgctggtgcaggtgcagcagctgcggtgtca

SEQ ID NO: 115 - DNA, 492 bp, synthetic construct
  misc_feature 1..492: note = Description of Artificial Sequence: Synthetic polynucleotide
  source 1..492: mol_type = other DNA
ggtcatatctggggaaccccaggagccggaaagtctgttactggttcgatcgtccagtgcgctggacaatctggagtcttttctggtgatcagatgcaagatcttggagatatggctgacgctgtcaatagacagttagatcgtttgggtccaaacgctccagatcaccgactcaaaggagtgactactatgatggctgctggtattgcggacgccgctgttaactctccgggtcaatcgctagacgtgatgatcaatacaatctctggctgcatgacacaagccatgtctcaagctgttggttatgtcgaccagaccctgattagggaagtcgcagaaatggtcaacatgcttgcaaacgaaaacgcaaacgcggtatctacctctggaggtgttagtggtggatcgtacgaggttagtcagtcctcatctgcttctagtgccaccgctcaggcgggttattcctcttctgtacaatttggaacctcatca

SEQ ID NO: 116 - DNA, 693 bp, synthetic construct
  misc_feature 1..693: note = Description of Artificial Sequence: Synthetic polynucleotide
  source 1..693: mol_type = other DNA
ggtgccttgggtcagggagcttcagtatggagctctcctcaaatggccgaaaattttatgaatggtttttcaatggccctttcccaggcgggtgccttttccggtcaagaaatgaaagactttgatgatgtaagggacattatgaatagcgcaatggacaagatgatcagatctggcaaatctggtaggggcgctatgagggcaatgaacgctgctttcggatccgctatagccgaaatagtggcagcgaatggtggtaaagagtatcaaataggagctgttttggacgctgtcaccaatactctgctacagttgacaggaaacgctgataatggattccttaatgaaatttccagattaatcactctattttccagcgtagaagctaacgatgtttctgctagcgctggtgcagacgcttctggctctagtggacctgttggcggatattcatctggcgcaggcgcagctgtcggtcaaggcactgcccaggctgttggctacggaggcggtgctcaaggagttgcctcatcagctgccgctggagccactaactacgctcagggagtttctactggatcaacacagaacgttgccacctccacagtcactactaccactaatgtagccggatccaccgcaactggttacaacaccggttatggtatcggtgcagcagccggtgctgcagca

SEQ ID NO: 117 - DNA, 795 bp, synthetic construct
  misc_feature 1..795: note = Description of Artificial Sequence: Synthetic polynucleotide
  source 1..795: mol_type = other DNA
ggtagaggaatcattgctaattcgcctttctctaaccctaatacagctgaagcttttgccagatcattcgtgtccaacatcgtttcttcaggtgagttcggtgctcagggtgcagaggacttcgacgatataattcaatctttaattcaagctcaatcgatgggcaagggacgtcacgatacaaaggcgaaggccaaagctatgcaagttgcccttgcaagctctatcgctgaattggttattgctgaatctagcggtggtgacgttcaacgcaagaccaacgtcatttccaacgcattacgaaatgccctgatgtcaaccacaggtagcccaaacgaggaatttgtgcatgaagtccaggaccttattcagatgttatcacaagaacagataaatgaagttgacactagcggccctggtcaatactaccgttcttcatcatcaggaggaggtggtggcggacaaggtggaccagttgttaccgagacacttaccgttactgttggcggatctggaggaggtcaaccaagtggtgcgggaccaagcggtaccggtggctatgcccctacaggttacgctccatctggatcaggcgctggaggtgtaagaccatccgcctcaggtccttccggttcaggtccgtccggtggttctaggccttcaagctctggtcctagcggtacacgtccatctcctaatggtgcctctggttcaagtcctggaggaatcgcaccaggtggatcgaacagcggaggtgcgggagtatctggagctaccggaggaccggcttcctca

SEQ ID NO: 118 - DNA, 717 bp, synthetic construct
  misc_feature 1..717: note = Description of Artificial Sequence: Synthetic polynucleotide
  source 1..717: mol_type = other DNA
ggtcgtggtatcatcgtaaattcccctttttcgaatccaaacactgcggaggcatttgccagatcattcgtttcgaacgttgtttcctctggagagttcggtgcccaaggagctgaagattttgatgatattattcaatctttaattcaagcccagtccatgggaaaaggcagacatgatactaaagccaaagctaaagctatgcaagttgcattggcctcgtccatagctgagttggttatcgctgaatcatctggaggagacgttcaaagaaaaacaaatgtgatttcaaacgctttgagaaacgccctaatgtcgacgactggctctcctaacgaagagttcgtccatgaagttcaagatctaatacaaatgctgagtcaagaacaaatcaacgaggtggatacctctggtccaggtcaatattatcgtagctcttcgtctggtggaggtggtggtggaggaggtggacctgtcataacagaaaccctcacagttaccgtcggtggaagtggagcaggtcagccatcaggagccggtccatcgggaactggtggttatgcgccaacgggttacgctccaagcggctctggtcctggaggagtcagaccatctgctagcggaccttccggttctggtccttctggatcccgtccctcgtcatctggatcttcaggaactcgtcctagcgcaaatgccgctggtggttcgagccca

SEQ ID NO: 119 - DNA, 723 bp, synthetic construct
  misc_feature 1..723: note = Description of Artificial Sequence: Synthetic polynucleotide
  source 1..723: mol_type = other DNA
ggtgttcaagtagagggtcgtaaaggtcatcatcatagctccggttcgtctaaaagcccttgggcaaacccagctaaggcaaacgccttcatgaagtgcctgatacaaaaaatttctacttctcctgttttcccacagcaggaaaaggaggacatggaagagatcgtcgagacaatgatgtcggccttctcaagtatgtctactagtggtggttcgaatgctgccaagctgcaagcaatgaacatggccttcgcttcgtctatggccgaattagtgatcgccgaggacgctgacaacccagacagtatttctattaaaactgaagccttggccaaatccttacagcaatgtttcaaatccactttaggttctgtgaacagacatttcatagctgagattaaagacctcatcggaatgttcgcaagagaggctgcggccatggaggaagcgggcgacgaagaggaagagacatacccatcagcctttgaaatccctgaccaatccatctccgttcctagcgcagattttatttcaggaatggataccttcattggattcggaggaacctctgcttccggtgacgtgtcagctaagttatctaaatctctgctctcttctttggcctcgtctggagtttttagagccgcatttaactcaagggtcagtactcctgttgcagtacagctcactgatgctttggttcagaagatagcgagcaactta

SEQ ID NO: 120 - DNA, 801 bp, synthetic construct
  misc_feature 1..801: note = Description of Artificial Sequence: Synthetic polynucleotide
  source 1..801: mol_type = other DNA
ggtttggattacgccacggcaagtaaattacgtaaggcgtcgcaggctgtttccaaggttagaatgggttctgacaccaacgcttatgctctcgcgatttcctctgcattggctgaggttttgtcaagtagtggaaaagtcgctgacgcaaacataaatcagatagcacctcagttagcttcaggaattgtgctaggtgtctccacaactgctccacagtttggagttgatttatcttccatcaacgttaacctggatatttcgaacgttgcaagaaatatgcaagcctccatccaaggcggcccggctccaattaccgctgagggtcctgattttggagctggttaccctggtggtgcaccaactgacctttctggattagacatgggtgccccatctgacggctctagaggaggtgacgcaaccgcgaaattgcttcaagctcttgttccagctttactaaaatccgacgtattcagagcgatctataaaagaggaacgcgtaaacaggtggtccaatacgttacaaatagcgctttgcaacaggcagcaagttctttaggattggacgctagcacaatttcccagttgcagaccaaggccacgcaagcactatcctcggtgtctgccgatagtgactcaactgcttacgcaaaagcttttggtttggctattgcccaagtgctaggcactagcggtcaagtcaatgatgctaatgtcaaccaaatcggcgctaagttagcaactggaatcttgagaggaagttccgctgtcgccccacgtttgggaattgatttgtca

SEQ ID NO: 121 - DNA, 435 bp, synthetic construct
  misc_feature 1..435: note = Description of Artificial Sequence: Synthetic polynucleotide
  source 1..435: mol_type = other DNA
ggtcaatctaatccgtggacagacacggctacagccgaaagtttcatatcctctgttatgtcctcggttgctaaccaaggttgcttgagctatgaccaaatcgatgatatgcaagccgtgggtgacactatgttagctacaatggacaaccttgtccgatcaggtaagtcatctagccacatgttgaaggccatgaacatggccatgggtacatctatcgctgaaattgttgctgatggcggtggaaatttaggtagcaaagtgtcttgcatctctaacgctctgtctagtgcgtttctacaaacaacaggatccgtcaatacacagtttgtgaacgagatcgtcagcttaatctcgatgttcgcacaagcagacacaaacgaagtcggcgttggatcgggctcaggagcaggagctggaagtggtgctggtgca

SEQ ID NO: 122 - DNA, 507 bp, synthetic construct
  misc_feature 1..507: note = Description of Artificial Sequence: Synthetic polynucleotide
  source 1..507: mol_type = other DNA
ggtgtgggacaagccgcgaccccttgggaaaactcgcaacttgcagaggattttatcaattcttttctcaggttcattgctcagtctggtgcattctccccaaaccaacttgacgatatgtcgtccattggcgatacacttaagacagctatcgagaaaatggcacagtctagaaagtctagtaagagtaaactccaggctctgaacatggctttcgcatcctctatggctgaaattgccgtggcggaacaaggcggactatcactggaagctaagaccaacgctatcgccaatgctttggctagtgcttttctggaaacaaccggattcgttaatcaacagtttgtttccgaaataaagtctttgatctacatgatcgcacaagcttcatcaaacgagatttccggaagcgccgcagccgcaggaggtggcagcggcggtggtggaggatcgggacagggaggctatggtcaaggtgccagtgcgtccgcctcagctgctgcagca

SEQ ID NO: 123 - DNA, 756 bp, synthetic construct
  misc_feature 1..756: note = Description of Artificial Sequence: Synthetic polynucleotide
  source 1..756: mol_type = other DNA
ggtgtttttagcgctggtcaaggtgctactccttgggagaattctcagttggctgagtcttttattagtcgttttttaaggtttattggtcaatccggtgcattctctcctaatcaattggacgatatgtcatcaatcggagacacactgaaaactgccattgaaaaaatggctcaatccagaaaatcttctaagtcaaaattacaggcccttaacatggcatttgcctcctcaatggccgagattgccgttgccgaacaaggaggtttgtccttggaggcaaaaaccaatgctatcgcttcagctctgagtgctgctttcttggaaactaccggttacgtaaaccagcagttcgtgaacgaaatcaaaactctaatcttcatgattgcccaagcttcttctaatgaaatcagcggtagtgctgctgcggcaggaggttcttctggtggaggtggtggcagtggtcaaggaggttatggccaaggtgcttacgctagtgcctctgctgctgctgcgtacggttcagcaccacaaggtactggaggtcctgctagccaaggtccttcccaacagggtccagtatcacaaccttcgtatggtcccagtgccacggttgccgtgactgccgtcggcggtcgtccgcaaggccctagtgccccaagacaacagggacctagtcaacaaggaccaggacagcaaggacctggaggtagaggtccatatggtccttccgccgcagcagctgcagccgctgca

SEQ ID NO: 124 - DNA, 636 bp, synthetic construct
  misc_feature 1..636: note = Description of Artificial Sequence: Synthetic polynucleotide
  source 1..636: mol_type = other DNA
ggtagaaccaaagttactaacgttccttggactgatgaggctaaaggaaaaaagttcctctccacttttcttgactacgcgttagatcatggactcttccctcaacaagagcgtgatgatctagaagccattagtcaaaacttaattccggtttttcgaaagacaatggattctggtggaaacgccgcggctaagatgaaggccttgaatatggcttttgcttcgtctattgcagagatagcagtgcaagaaggtggtgcgggatcaattgaagagaaaactcaggctgtttctgaggctttagctcatgcgttccttcagacaacaggttctgttaacatccaattcattaaagagattagagcactcattacgctgtttgccaaagaaggccaggataacgaaacagaaaacgaaattccaacccagcaagcataccctgagctgcaacctagaggtggcggtttgcaaggccagccaggtcaatacgaatccgttagagcaaactacgccggttccggtggtgctagccgtggtcaagctgcaaaggaagattcaggcgctgctgccgcatcttcttccagcacatccacatcaactactacaactagttcagcagcggctgccgccgctgca

SEQ ID NO: 125 - DNA, 873 bp, synthetic construct
  misc_feature 1..873: note = Description of Artificial Sequence: Synthetic polynucleotide
  source 1..873: mol_type = other DNA
ggtgcttcaagttatgcctctgcaaatactacgccatggcgagacgctgctacagctcaagctttcataggcaattttatgcaagctatctgctatgatcctgttattaatcctcaacagtgcgacgatatgaattctatggcaagcacaatcctggctggtgttcagaacatggccagagatggtaaaatatctaaagcgaagctgcaagctatgaatatgggattcgcatcggccattgctgagattgcacttgtcgaaggaggtgccccagccgaaaacgctgtggttaatgctatgcaatccgctatctggcagagcactggttcgcccaaccgttcctttattaatgaaatgaaagcactcatgaagatgcttgcccaacaatccaatttcgtggccgccgctgcttccactgcagcgtccgccagtagtcaggctaccgccccagcttatggaggaggtagcggtagtgccgttgcatctgcctcttcgcaaggaacagctccagcctatggtggtggctcgggttctgctggtggtcagggtcaaggtcagggttcttccggtcaacaaggccaaacacaaggaacttatcagtacactgttagcatgagcactgctacttctacttatggacagcaatccgccggacaacaaggaggccaaggtggagcccttcaaggtggtcgacaacagggtggccaaggtccaaacggaccaggagcttctgccgccgcatccgcttccgctggagcaccagctgctgctgctcctggaggatatggtggtccaggtcagcaaggacctggtcaaggacagaaaggaccagcgacttcagcagcagctgccgccgcgagcgcaactgcagca

SEQ ID NO: 126 - DNA, 744 bp, synthetic construct
  misc_feature 1..744: note = Description of Artificial Sequence: Synthetic polynucleotide
  source 1..744: mol_type = other DNA
ggtcaccagggacctcatcgaaagacgccctgggaaacaccagaaatggctgaaaacttcatgaataacgtaagagaaaaccttgaagcatctagaatcttccctgacgagttgatgaaagacatggaggctataaccaacaccatgattgctgctgttgacggtctggaggctcagcatcgatctagctatgcatcccttcaggctatgaacacagctttcgccagtagcatggctcaattatttgcaacagagcaagattatgtggataccgaagtcattgccggtgctattggtaaagcctaccagcaaattactggttacgagaatccgcacttagctagtgaggttactcgactgattcaattatttcgcgaggaggatgatttggagaatgaagtagaaatatccttcgccgatactgacaatgccattgctagagcggctgctggtgctgccgctggatcagctgctgcttcttcctcagccgatgcttcagcgacagctgaaggtgcatcaggtgatagtggtttcttattttccacaggaacctttggaagaggtggtgctggtgcaggcgcaggagctgctgctgcatccgccgccgcagcttctgccgcagcagcaggtgccgagggcgacaggggtttgtttttcagtacaggtgattttggtcgtggaggagccggagctggtgccggtgctgctgcagcctcagccgctgccgcttcggctgccgcagca

SEQ ID NO: 127 - DNA, 429 bp, synthetic construct
  misc_feature 1..429: note = Description of Artificial Sequence: Synthetic polynucleotide
  source 1..429: mol_type = other DNA
ggtaacacaccattcgctaataaaattatggccgaagattttatgaataaatttacaaaccaactggccaatagcccatatttctcctcacagcaaaaagaagatatgagttctatcaaggacgagcttatatctgtaatagagagtatggattcggctcacaaatcttcagcggcaaaactacaggctatgaacatggccttcgcgagtgctattgcagatatcgctgctactgaagcttatggtgctgacatctctctcgagacgtccgcaatcgctaacgcactttctgaagccttcctgcagaccaccggtgtggtcaataagaggttcatcagtgagatccaagaattgatttatatgttcgctcaggacgccagcgtccaatctaatgagattgcctcctcctcgtctgctgctgcagctgca

SEQ ID NO: 128 - DNA, 534 bp, synthetic construct
  misc_feature 1..534: note = Description of Artificial Sequence: Synthetic polynucleotide
  source 1..534: mol_type = other DNA
ggtagtagctctcttgcttcacataccaccccttggaccaatcctggactagcagaaaactttatgaactcttttatgcaaggtttgtcctcgatgccaggatttactgcaagtcaactggatgatatgagtaccattgctcaatctatggtacaatcaatccaatcgctcgcagcacaaggaaggacttctccaaataagttacaagcactaaatatggcttttgcaagttctatggccgaaatcgcagctagcgaagaaggtggaggcagcctgtctactaagacctcaagtattgcttctgctatgagcaatgcttttctgcaaaccacaggtgttgtcaaccaaccattcattaacgaaatcacgcagcttgtgtccatgttcgcacaagctggtatgaatgacgtaagtgcttccgcttcggcaggtgcctctgccgctgcttcggccggtgcacctggatactctccggctccgtcttactcctctggtggatacgcaagctcagcagcttccgccgccgcagctgca

SEQ ID NO: 129 - DNA, 471 bp, synthetic construct
  misc_feature 1..471: note = Description of Artificial Sequence: Synthetic polynucleotide
  source 1..471: mol_type = other DNA
ggttttgttgttcaaggtcgccaacataacgccgctaattccccatggtccaacgctaagaccgccgagatttttatttctaaatttatcagcgcgatcctggactccaatgcattcacacgtgaacaaaaggaagatatgatgtctataggtgaaaccatcatcccagctatggagaagatgtctggtagttcgaagtccatacatgctaagctaaccgctctgaacatggctttcgcctcttctgtcgctgaaattgctgtggttgaggagggtggatccgacattaacgagaaaacatacgccatcgtggctgctctcaaccaagcctttctggatacaacgggaaaagttaataaacaattcattgcagagatcagggatttggtcaaaatgtttgcatcagctaacgaagaaaacgaaataggtgcggcgctatcagctgagatttacacggaacaaactggctca

SEQ ID NO: 130 - DNA, 648 bp, synthetic construct
  misc_feature 1..648: note = Description of Artificial Sequence: Synthetic polynucleotide
  source 1..648: mol_type = other DNA
ggtagagcatacggagcaggagctggcgctggtgctgaagagggttacggtgctggtcaaggtatagccaacgcagttggaagaagaagggacagaactggtagaggtgtctttactgttagcactgtttcctccaatgtagttagtcagtccgaaggtctagttgaggacacgggcccaagtggagagggagaaagcgctgtttcttccgctgcatccgccgcaagtgctgctcaaacaggtccagaaagaacaggaagtgaaggtgcttcgacgagaggaggtgctggagcaggaagaggcttcggtgccggcgccggtgcaggagctgagtcaggcaaaggaggatacggttccggttctggagctggtgctggcgctggtgccggtgcttcaggcgagggaggcttcggtgaaggtcagggatacggtgctggtgctggtgcgggcgcttcggctggtgctggcgttggaagtggagcaggcgctggagccggatacggtgccggagcaggcgccggtgccggttttggcgtcggagccggagcaggtgccggagctggcgcaggatttggttccggtgcaggtgccggatctggtgcaggcgctggatatggtgccggaagagccggtggtcgtggacgtgga

SEQ ID NO: 131 - DNA, 534 bp, synthetic construct
  misc_feature 1..534: note = Description of Artificial Sequence: Synthetic polynucleotide
  source 1..534: mol_type = other DNA
ggtcaaaatactccatggtcatctactgagctggctgatgcttttatcaacgcgtttatgaatgaagccggtcgaactggtgcttttactgctgatcaactagacgacatgtctactattggagatacgataaagacagccatggataagatggccagatccaacaagagcagtaagggtaaattacaagcgctgaatatggctttcgcatcatctatggctgaaattgccgctgtggaacagggaggcctctcagtggatgccaaaactaacgccattgctgactccctcaatagcgctttttaccaaactacaggagctgctaaccctcagtttgtcaatgaaatcagatctcttataaatatgttcgctcaatcgtctgccaacgaggtttcttacggcggaggatacggcggtcaaagtgcaggcgctgccgcaagtgcagcagcagctggtggcggtggccagggtggctacggcaatctgggcggacaaggtgctggagctgcagctgcggcagccgcttcagcagca

SEQ ID NO: 132 - DNA, 534 bp, synthetic construct
  misc_feature 1..534: note = Description of Artificial Sequence: Synthetic polynucleotide
  source 1..534: mol_type = other DNA
ggtcaaaacacgccttggtcctccaccgagcttgctgatgcctttattaacgctttcttaaacgaggctggacggactggtgcttttaccgccgatcaattagacgacatgtctacaatcggtgatactttgaaaacagccatggataagatggctaggtcaaacaaatcttctcaatcgaaattgcaagctctgaacatggctttcgcatctagtatggcagagattgctgctgtagaacaaggtggcttgagtgtggctgaaaaaactaacgccattgctgattcacttaatagtgcattttatcagacgaccggtgctgtaaatgtacaatttgtaaacgaaataagatccctcatttccatgtttgctcaagcttcggcaaatgaagtctcctatggaggcggatatggcggtggccaaggtggtcaaagtgctggtgctgcagcagctgcagcttccgcaggtgccggacagggcggatacggtggactaggtggacaaggagcaggttccgcagccgctgctgccgca

SEQ ID NO: 133 - DNA, 435 bp, synthetic construct
  misc_feature 1..435: note = Description of Artificial Sequence: Synthetic polynucleotide
  source 1..435: mol_type = other DNA
ggtcaggccagatcaccttggtcagatactgcgaccgctgatgcttttattcaaaactttctggctgccgtctccggatccggtgctttcaccagcgatcaattggacgatatgtctactataggtgacaccattatgtctgctatggataagatggcaagatcgaacaagagttcacagcataaactgcaggccttgaacatggcattcgctagttctatggctgagatagccgcagttgagcagggtggcatgtccatggcagtcaagaccaatgcaattgtcgatggactaaactcggctttttatatgactactggtgccgccaaccctcaatttgtcaacgagatgcgatcgctgatttctatgatttcagctgcatcagctaacgaagtgtcatatggaggaggagcatctgccgctgctgccgcagca

SEQ ID NO: 134 - DNA, 651 bp, synthetic construct
  misc_feature 1..651: note = Description of Artificial Sequence: Synthetic polynucleotide
  source 1..651: mol_type = other DNA
ggtattttcattgccggtcaagctaatactccatggtctgacactgctaccgccgatgcattcatccaaaatttcttgggtgcagtctcgggcagtggtgcttttactccagatcaactcgacgacatgagtaccgttggagatactatcatgtctgctatggataaaatggcacgcagtaacaaaagtagtaaatcaaagctccaagcacttaacatggcatttgccagttccatggctgagatcgcagccgtggagcaaggaggccaatccatggacgttaaaacaaatgctattgccaatgcacttgattccgcattttatatgacaactggtagtaccaatcaacagttcgttaatgagatgcgatcattgatcaatatgctgtcagccgccgctgttaatgaagtttcctacggtggaggagcatcagcggctgcagccaccgctggaagctacggacagggtcctagcggttacgctcaaggttcatccgctgcaagtgctgcagctccgtcaggttatgtcccctcccaaacaggacaatctggtctgggtgccgctgctgctgcagcagctgtagccccttccggatatggtccaagtcagcaaggtccatcaggtccgggtgcagctacagccgctgccgca

SEQ ID NO: 135 - DNA, 438 bp, synthetic construct
  misc_feature 1..438: note = Description of Artificial Sequence: Synthetic polynucleotide
  source 1..438: mol_type = other DNA
ggtcagaatgttgctgattctccttggtctagcaatgagaaggctgattttttcattcgttctttcaacgaagtcatatccaggtcctcggcatttacttctcaacagatcgatgatatgagtagtattggcgaaacattaatcagctccatcgataacatggccaagaatggtagatccagcactaagaagctacaagccttgaatatggcgttcgcttcatcaatggcagagattgcaatcgcagaacaaggcggtcagagtattgatgttaaaacaaatgcaattattgacgcactaaacgaagcatttattcgtacttcgggttctgtcaacaacgaattcatctcggaaattcggcagctaattcttatgttcagtcaagtttcgatgaatgattccgcttccggtagcaccgctgccgcaaacgcaggcgca

SEQ ID NO: 136 - DNA, 540 bp, synthetic construct
  misc_feature 1..540: note = Description of Artificial Sequence: Synthetic polynucleotide
  source 1..540: mol_type = other DNA
ggtgctaggggaattcacgtttcttcttataccccattcgcagacccatacacagctgagaactttgctcgcgctttcgttaataacattgttaactcaggtgagtttggtgctcaagacgcagccgactttgacgatattacgcagtcactcttgcaagctcaaaatttacacaaacgtcatgacagtaatgctaaggcaaaagctatgcaaatggcctttgcttcctctattgctgaactagttatcgcggaatcggaaggagcaaacattcaaaggcgtacatccacagtatctaactgtatgcgtaacgcaatgcaatcaacgaccggtggtgtggacgaagagtttatgcgtgaaattgaggacttgattcatctgttctcacaagaaagttttaacgaagtcgaaaactacggtcctggtacatattaccagtcgtctactacaggcggagctcctgtggtgaccgagtctgtcactgttaccgtagcaggtggcggacgtggcgctccagttaatcaaggaggacaagcccca

SEQ ID NO: 137 - DNA, 519 bp, synthetic construct
  misc_feature 1..519: note = Description of Artificial Sequence: Synthetic polynucleotide
  source 1..519: mol_type = other DNA
ggtggaggtccaactccctgggattcaccatcaatggccgagtcattcatgagtaacttcatgtctggaattgcttccagtggcgctttctctggcggacagatcggagatatgcaagatattacaggaaccatgcaggattctgtaaataagatggcctctactggaaggtcgtcaaaatctaaactccaggcaatgaatatggcattcgcatcgtctatggccgaaatcgcagctgcggaggcaggtggatcctctatggctgccaagactagtgctatcacaaatgccctaaggggtgctttcttgcaaacaacaggagtttctaatgagcagtttatcaacgaaattgctacgttgattaacctgatctctcaatccaacgtgaatacagtatcagcttcggcttccgcaggaggtggtggaggttacggcgcccctgcttatggtccttcatcttacggtccatcccaaggaccttcgtcagtgtcatccgttagcgtctcctcatcagctgca

SEQ ID NO: 138 - DNA, 531 bp, synthetic construct
  misc_feature 1..531: note = Description of Artificial Sequence: Synthetic polynucleotide
  source 1..531: mol_type = other DNA
ggtagaggaattcatgtttcaattctttcaaatccgaatactgctatgaccttcgctcgtactttcgtctctaacattgctggatgtggcgaatttggatcgcagggtaccgaggatttcgatgacattatgcaatctcttattcaagctcagtccatgggaaagggtagacatgacaccaatgctaaggctaaggccatgcaaatggccctagccagctctattgctgaattgattgtagaagagtccggtggagtaaatatgcaacaaaaaaccaacgccgccattaacgctctgcgtaacgctttgcgttctacaagtggtaaggtagatgagggatttgtgagtgagattgtggaactcgtgaatttgttttcacaagaacagtttaacgaggtcgataccggatcatcacgtcaatactaccaatcctcgaccggtggtggccagggaggagctccaaccgtaactgaaactgttactgtatctgtcggaggaggtggaggtggtgctgcccagtccagtggacca

SEQ ID NO: 139 - DNA, 489 bp, synthetic construct
  misc_feature 1..489: note = Description of Artificial Sequence: Synthetic polynucleotide
  source 1..489: mol_type = other DNA
ggttacccccaacagaactatcagcctggaattggcatagcccaagacgatccattacttgatgaaggaaccggtgagaatttcgcggatgttttcactcaaaccttggaaaactgtggtgcttttactcacgacgaggctcaggagtataaagaaattattcgtgtgctgacgaaagcattcggatcattcccggacctgcagaaggctccacctggtgttctgaaagctacagccgccggtttcgcttcagcggtggcggaacgaactgctgctgatgttgaccacggacagttgtttgcaaagacacgatgtgtaatccaggctttgagagaggcattcatcgttactacgggagttactaacccatattttatatccgaggtggaaagattgatcgaagttttctatattaccaagggtctacctcactctcctgtccagcaacctctagaagaaccacaaggtcaagtacaataccaacaacaa

SEQ ID NO: 140 - DNA, 540 bp, synthetic construct
  misc_feature 1..540: note = Description of Artificial Sequence: Synthetic polynucleotide
  source 1..540: mol_type = other DNA
ggtgcatcacctactttttctcgaagtccttgggctaaccctgctaaggcttcttcacttatgaactgtctcatcactaaaatcgcatcatcaaacgttctacctcaacaggaaaaagaagatcttgagtcaatcatggataccttgatgtctgctataaagggtgcctccgcaaaaggaaagtcatctggtgctcaattgcaggccattaatatggcagtcgcttctagtttggctgagatcgtcgtcgctgaagatgtaggtaaccaagcttcgatggctgtcaaaactcaggccctgtcgggagccctagagcagtgtttccagaccgtgatgggaacggttgaccgaaagttcattaaggagattaatgacttgatcagtatgtttgctagacaagccgctacggaggctaatgaaattcaggaccagggcggtttttacgccgccggtagttcggactctactagcttccaggcaacgtctcgcactttacagggatcttcacaaacgacaggaggattcggaggagcatatcca

SEQ ID NO: 141 - DNA, 501 bp, synthetic construct
  misc_feature 1..501: note = Description of Artificial Sequence: Synthetic polynucleotide
  source 1..501: mol_type = other DNA
ggtcagtccaaccctgttaacgatgatccgtatggctttaatgaaaccgagaagaagttttctgacgttttcgtggataatgtcattaattcagatgccttcactctaatgggtgaaaacgacattgaagaggtgacgaacattttgctgacgtccatacaactccttaagaagtctcaggatggagatgcgaatcaaaaaaagaccttgatggtagcttttgcgtctagtatggccgaacttattttggatagatgtgacactacattaggtatcgaacataagaccgagattataacaaatgccttgaagaatgcttacctacaaaccacaggaaagcccaataagcctctgatcaaggaggtcaggttccttgttgcactgtttttgacactggagtccccaggttttttagatcctttgtggaatccatacggaagaaatccagctttcggactgccaccatcctatggagttccactatacccagcgcccccacaa

SEQ ID NO: 142 - DNA, 447 bp, synthetic construct
  misc_feature 1..447: note = Description of Artificial Sequence: Synthetic polynucleotide
  source 1..447: mol_type = other DNA
ggtcttggacagtccccgtggaaggacgcctcaatagctgagtcattcatgaataacttctctaacgcgcttgcccgctccggagctttttcgagtgaccagatggacgacatcatgtctatttgtgactcaattcagtctggaattgtcagaatggatcggtcaggtaaaacttctgctaataagttgcaagctatgaatatggcttttgcctccgctgtggcagaaatcgcaattgccgagggtggaggacaatctgctcaagtcaagacaaacgctgtcgcagacgctttagccagtgcttttctacaaacaaccggagtggtaaacacacagtttatcaacgaaataagaactttaatctctatgtttgctcaggctaacgttatcgattcctcttcgggtagtgtttccgcaagcgctggtggagctggtcaaggaggagca

SEQ ID NO: 143 - DNA, 600 bp, synthetic construct
  misc_feature 1..600: note = Description of Artificial Sequence: Synthetic polynucleotide
  source 1..600: mol_type = other DNA
ggtttcggccaggcagctaccccatgggagaacactgccttggcggaagcctttatcaataagtttttggaatcaattggacaaactggaaccttttcggctagccagcaggacgacatggcgacgattggagacactcttaagaccgccatggaaaaaatggctcaatctaggaaatcctcgaagtctaaattacaagctcttaatatggctttcgcttcatctatggctgaaattgcagtggctgaacagggaggtttgtcaattcaggcaaaaacggaagcaatagcttcagctctgtcgagcgcttttttgcaaacaacgggtgtgattaattaccaattcgttaacgagatcaaatcgttgatatacatgatcgcccaagctagcactaacgaggtcggttcttccgccgcgtcggctggaggtggatccggtggaggtagctacggacagggttcctacgtatctgcttctgctgcgggtacatacggttctgctcctcaacagggcggttacgcacctgcacagggtccttcccaacaaggacctgtgtcccaaggtccatatggtccgagtgcctctgttgccgccgcagca

SEQ ID NO: 144 - DNA, 384 bp, synthetic construct
  misc_feature 1..384: note = Description of Artificial Sequence: Synthetic polynucleotide
  source 1..384: mol_type = other DNA
ggtcaacaaatttggacaaatcaggctgctgtaatggcaatgaccaacaattttgttggatgtgctagccagtccggcatgctcagtgctgatcaaatggatgacatggctatgatggcagacaccattaacatgcaagcaacgaggatgggtcctaatgctcccagacacaaattgaaggcactcaactctgctatggccgcttctattgctgaagtcgctgctagttccccaccacaatcctattccgccgtgttgaatgctattggatcctgcctgagggactcaatgatgcaggcgactggtgcagttgatgaaattttcacaaccgaagtgatgaagatggtgaacctattcgctatggataacgctaactcggtatca

SEQ ID NO: 145 - DNA, 522 bp, synthetic construct
  misc_feature 1..522: note = Description of Artificial Sequence: Synthetic polynucleotide
  source 1..522: mol_type = other DNA
ggtcagaagatttggactaacccagatgccgcaatggccatgacgaacaatttagtccaatgcgctggtcgtagcggagcattgactgccgatcagatggacgacttgggtatggtttctgactctgtaaattcccaagtaaggaagatgggagctaatgctccacctcataaaattaaagccatgagtaccgctgttgccgctggtgttgcagaagtcgttgcttcttccccaccccaatcctattctgccgttttaaacactattggaggatgtttacgagaatccatgatgcaggttacgggttcagttgataacactttcactactgagatgatgcaaatggtcaacatgtttgctgccgataacgccaacgaagtgtcagctagtgcttccggcagtggagcctcctatgccactggtacctccagcgctgtgtcaacttcgcaggctacaggatattctacagctggtggatacggcacagcagccggcgccggagcaggagctgctgctgccgca

SEQ ID NO: 146 - DNA, 543 bp, synthetic construct
  misc_feature 1..543: note = Description of Artificial Sequence: Synthetic polynucleotide
  source 1..543: mol_type = other DNA
ggtgctgcatctagtagtagcactatcatcacaacaaaaagcgcttccgctagcgctgccgcagacgccagtgctgctgctactgcctccgctgccagcagatctagtgccaatgcagcagcatcagcgtttgctcagtctttttcctccattctgttagagagtggatacttctgtagtatctttggatcatccatttcatcttcttatgcagccgccattgcttctgcagcatcacgcgcagccgctgagtcaaatggctacacaactcacgcttatgcgtgtgcaaaagctgtagcttctgccgtagaacgtgttacttctggagccgatgcttatgcctatgcccaagcaatttccgatgctctatctcacgcgctcctctacactggcagactcaacactgctaatgctaactcattggcaagtgcgtttgcttacgctttcgctaatgccgctgcacaagcaagtgcatcatcagcttctgctggagccgcctctgctagtggtgcggccagtgcctcgggtgcaggatccgcttca

SEQ ID NO: 147 - DNA, 543 bp, synthetic construct
  misc_feature 1..543: note = Description of Artificial Sequence: Synthetic polynucleotide
  source 1..543: mol_type = other DNA
ggtgcagcttcaagttcatcgacaatcatcaccacaaaatccgccagtgccccagctgctgctgatgctagtgctgccgccacctcatctgcagcttctagatcctctgctaacgcagccgcatccgcatttgcgcaatcatttagtagcatcttgctcgaatcaggatattttggttctatttttggatctagtatatcttcaagctacgcagctgctatcgcttctgccgccagtcgtgctgctgcagaatccaatggatacacaacacacgcatacgcatgcgcaaaggctgtagcatcagctgttgaacgcgtgacttcaggtgcagacgcatatgcatatgcacaggctatttctgatgcgttgtcccatgcattgttgtacacgggtcgacttaataccgccaacgcaaactctctcgcctctgcgtttgcttatgcttttgcaaacgccgctgcgcaggccagtgcgagttcagcctccgctggagctgcatctgcctccggtgcagcatctgcttcaggagctggatccgcttca

SEQ ID NO: 148 - DNA, 543 bp, synthetic construct
  misc_feature 1..543: note = Description of Artificial Sequence: Synthetic polynucleotide
  source 1..543: mol_type = other DNA
ggtgcagcttcgtcctctagtaccattataactactaaaagtgctagtgcttccgcggcagctgatgcttctgctgcagctactgcatccgcggccagcagatcctctgcaaatgctgcagcaagtgcatttgctcaaagattctcctctattctgctggagtcgggatacttctgttctattttcggttcttccatttctagttcttatgcggctgccattgcttctgcagcgtcgagagctgcagctgaatccaatggatacactactcatgcttacgcatgtgcaaaggcagttgcaagtgccgtcgaaagagtcacctccggtgccgatgcctacgcttacgcacaagccatctctggtgcactctcacacgctttactttatacgggaagattgaatacggcaaacgctaactctttggcttcagcttttgcttacgctttcgctaacgctgcagctcaggccagtgctagttcggcttccgcaggtgcagcctcagcctcaggagctgctagcgcctctggagctggtagcgcttca

SEQ ID NO: 149 - DNA, 543 bp, synthetic construct
  misc_feature 1..543: note = Description of Artificial Sequence: Synthetic polynucleotide
  source 1..543: mol_type = other DNA
ggtgcagcttcatcatcttcaactatcattacaactaaatcggcttcagcctcggctgctgcagatgcgtcagctgcggcgactgcgtctgcagctagtaggtcctctgcgaacgcagccgcaagtgcctttgctcaatcgttctcatccatccttttggaatccggatacttctgctctattttcggatcgtcaatctcctcaagttacgctgcagctatcgcctccgcagccagtagggctgctgccgaaagtaatggttacacgacccacgcatatgcttgtgcaaaggcagttgcctccgctgttgaaagagttacatcgggagccgatgcatacgcctatgctcaggctatttccgatgcattatcccatgcactattgtatacaggtagattgaataccgcaaacgccaatagtttggcttcggcttttgcatacgctttcgcaaatgcagcagcccaagcttctgcttcatcagcttcagctggcgccgctagtgcctcaggagctgctagtgcttccggagcaggttccgcctca

SEQ ID NO: 150 - DNA, 543 bp, synthetic construct
  misc_feature 1..543: note = Description of Artificial Sequence: Synthetic polynucleotide
  source 1..543: mol_type = other DNA
ggtgctgcatcttccagttcgactataataaccaccaagtcagccagtgcatcagcagctgcagatgcttcagctgctgctaccgcctctgctgcatctcgatcctccgccaatgcagcggctagtgcctttgcgcaatctttctcttccatcttgctagagtctggttatttttgttcgatttttggatcatccatatcttcatcatatgcagccgcgatcgcgtctgctgcaagtagggctgccgcagaaagtaatggttacacgacccatgcatatgcctgtgcaaaagctgtagctagtgcagttgaaagagtaacctcaggcgctgacgcttacgcctatgcccaagctattagcggcgcacttagtcatgctctgttgtacactggtcggttaaatacagctaacgctaactctttagccagtgccttcgcatacgctttcgcaaacgctgccgcccaggcctcagcttcttctgcctccgcaggtgcagcatcagcttcaggagcagctagcgcctcaggtgcaggttcagcctca

SEQ ID NO: 151 - DNA, 543 bp, synthetic construct
  misc_feature 1..543: note = Description of Artificial Sequence: Synthetic polynucleotide
  source 1..543: mol_type = other DNA
ggtgcagcatcatctagttctactatcataactactaaatcggctagcgccagtgctgctgcagacgcatcagcagctgcaactagttcggccgcctccaggtctagcgccaatgcggccgcttctgcctttgctcaaagtttttcctctattttgctggaaagtggatatttcggttccattttcggttcttctatttccagcagttatgccgccgcaattgctagtgctgcctcgcgagcggctgcggagagtaatggatatactactcacgcctatgcctgtgccaaagcagtcgctagtgcagtagaaagagttacctcaggtgccgatgcatatgcctatgctcaggcaatttcgggagctctttcacatgccttgttgtacaccggtagattgaatacggctaatgctaactcattggcatcagacttcgcttacgcattcgcaaacgcagccgctcaagctaccgcctcttccgcctctgcaggagcagcttcggcctccggtgctgcttctgcatctggtgccgcatccgcatca

SEQ ID NO: 152 - DNA, 543 bp, synthetic construct
  misc_feature 1..543: note = Description of Artificial Sequence: Synthetic polynucleotide
  source 1..543: mol_type = other DNA
ggtgcagctagttcctcttcaactataattactactaaatcagcatctgcaagcgctgccgccgacgcatcggcggcagctacagcatcagccgcgtctagatccagtgcaaacgcggctgctagtgcctttgcacaaagctttagttccatattgttggagagcggttatttcggttctatttttggatcttccatttctagctcctatgcagccgcgattgcttcagctgcttctagagctgctgctgaatccaacggatacacaacacatgcttatgcttgtgcaaaggctgtcgcttctgccgtcgagagagtcaccagcggagccgatgcctatgcctacgctcaagcgatctccggtgccttgtcttatgcactcctttacacaggtagactgaatactgctaacgcaaactcattggctagtagctttgcttacgcttttgcaaacgctgcagctcaggcttctgctagcagtgcgtccgctggagcagcatccgcttctggtgcggcttctgcctccggagcagcttccgcttca

SEQ ID NO: 153 - DNA, 507 bp, synthetic construct
  misc_feature 1..507: note = Description of Artificial Sequence: Synthetic polynucleotide
  source 1..507: mol_type = other DNA
ggtgccgctgctacatcttcatcgaccagcggagcctcggcctctagtatttcgtccacaactgcctcaagttcttctacaggagcaagttcagctgccgctggagctagtcacggagcagcttcggcgggtggagcatttgattttacgagagctctattttctgaactgctagaatctaagatattttccgccaccacggcaaactttcatagttccacaacggcttctgaaactctttacgccaccattctgaagtgccttagggaattacacttcaggtacgacgaatgcttgcaaggtgcaactgaagtggtgagtgatttgtctgtagtatccgttggttctggagttcacaactacgctagagttattgcagctttctttgaacgcttctttcgaaagcacgacatcccattgtccgcaaactatgcttccagagttgcacagtatttaatttcagctatgggcagttcggtagcttccgcagacgcttcgtcgtcatca

SEQ ID NO: 154 - DNA, 507 bp, synthetic construct
  misc_feature 1..507: note = Description of Artificial Sequence: Synthetic polynucleotide
  source 1..507: mol_type = other DNA
ggtgcggctgccactagttcctctacttctggtgcatcagccagcagcatctcctcaacaactgcttcctctagtagtactggagctagttctgctgcggctggtgcctcgcacggtgccgcctcagctggtggagcgttcgatttcacacgcgcattgtttagcgaactgttggaaagtaaaattttctcagctaccaccgcgaacttccattcttcaacgactgccagtgagactttgtatgctacgatactgaagtgtttgcgtgagttgcacttcagatacgatgaatgtctgcagggagcaaccgaagttgttagtgatttgtctgtagtgagtgtaggatctggagtccacaactatgctcaagttatcgctgcctttttcgaaagattcttcaggaaacacgatattcctctgtcggcaaattatgcctctagagtagcccagtatctcattagcgctatgggctcaagcgttgcaagcgcagatgcttcgtcctcatca

SEQ ID NO: 155 - DNA, 507 bp, synthetic construct
  misc_feature 1..507: note = Description of Artificial Sequence: Synthetic polynucleotide
  source 1..507: mol_type = other DNA
ggtgcagcggctacgtccagcagcacatctggagcctcagcatcttccatttcatcaaccactgcatcaagctcaagtacgggagcttcctccgctgcagctggcgccagtcacggtgctgcatccgccggtggcgcattcgattttacaagagctttattttcagaactgctggaatcaaaaattttttctgccactaccgcgaattttcattcgtccaccactgcttctgagacactttacgccaccatattaaaatgtttgcgtgaattgcactttcgatatgatgaatgcctacaaggagctacagaggttgtatcggatctgtctgtcgtgtccgttggaagcggtgttcataactacgcacgcgttatcgccgctttcttcgaaaggttttttagaaagcacgacatcccactgtcagctaactatgcttctagggttgctcaatacctgatctcagcaatgggatctagcgtcgctagtgctgatgcgtcctcctcttca

SEQ ID NO: 156 - DNA, 507 bp, synthetic construct
  misc_feature 1..507: note = Description of Artificial Sequence: Synthetic polynucleotide
  source 1..507: mol_type = other DNA
ggtgcagctgcaacaagttcatcgacttctggcgctagcgcttcatcaatatcttcgactacagctagcagtagttccacaggtgcttcatcggcagcagcaggagcaagtcatggtgccgcttcggcgggaggagcttttgatttcacaagagccctattttctgagctactcgaatctaaaatcttctccgctacaaccgctaatttccactcatcaactacggcctcagaaacattgtatgcgactattcttaaatgcctaagggagttacactttcgttatgatgaatgcttgcaaggagcgactgaggtagtgagtgacctctctgtagtatctgtcggcagtggtgttcataactatgccagggtaatcgccgcattcttcgagcgattttttagaaaacacgatataccacttagtgctaattacgcctcccgggtggcacagtacttgatttctgcaatgggttctagcgttgcttctgcagatgcctcttccagttca

SEQ ID NO: 157 - DNA, 507 bp, synthetic construct
  misc_feature 1..507: note = Description of Artificial Sequence: Synthetic polynucleotide
  source 1..507: mol_type = other DNA
ggtgcagccgccacaagtagctccacatctggtgcctcagcttcatctatttcctcaactacagccagctcttccagtactggagcttctagcgcagcagctggtgcttcacatggagcagcttccgctggaggtgctttcgacttcacaagagccttgttctctgagctgctggagtcgaaaatcttctctgcaacaactgctaatttccattcgtcaactactgctagtgaaactctatatgctacaatcctaaagtgtcttagggaattacattttagatatgatgagtgcttacagggagcgaccgaggtggtcagcgatttatctgttgtctcagtcggaagtggtgttcataattacgctagagtgatagcagcatttttcgagagattcttcagaaagcatgatatcccgcttagcgccaattacgcgtctagagttgcccaatacctgatatctgccatgggttcatctgtagcttctgcagatgcttcatcatcatca

SEQ ID NO: 158 - DNA, 537 bp, synthetic construct
  misc_feature 1..537: note = Description of Artificial Sequence: Synthetic polynucleotide
  source 1..537: mol_type = other DNA
ggtgctagttcgacaacgaccgccacatcggaatcaggaattactgcttcctcagttgcaactggagcagccgctgccatttctaagactgcagccggtagtagttctattacttacctagctcgctcgttttccagatcattagtgagttatttattgcaaagcgcagaattccattcggttttttacagtggaatttcgtctggtattgcttcgcatatagcctccaccgccggaacatctactgcagagtcactggacctcgctagcctcaaatctgtcatagcaacagcctgcggaaaagctatggctgctacaaattccgagggaggtcctcatgctttcgctaatagtctaggatccgccataaccgcggttttgatcgaaaacgctattttaacaagcgagaattacgattattttgcaaaagaattcgcccacatcttttcaatttctgcatcgaaggtagtatcagctactagtgcaaagtctgcaagtgaggccacaagtgcttcttggacggctgcatctcgtaca

SEQ ID NO: 159 - DNA, 537 bp, synthetic construct
  misc_feature 1..537: note = Description of Artificial Sequence: Synthetic polynucleotide
  source 1..537: mol_type = other DNA
ggtgctagctccaccactaccgctacctctgaatccggaattacagcttcatcggttgccacaggagctgctgcagccataagtaaaactgcagcaggatcttctagcatcacctatttggccagatcatttagtaggtcattggtgagttatttgttacaaagtgccgaattccactccgttttctactctggaattagttcaggtattgccagtcatattgcttcgacagcaggtacgtctacggctgaatctttggacctggcttccctgaagtccgtgatagcaactgcctgtggtaaagctatggcggctactaactctgatggtggaccacacgcctttgccaattccctgggttccgccattacggccgttttgattgaaaacgctattcttacgtcagagaattatgattattttgctaaagaattcgcacacatattctccatttctgcatctaaggtagtaagtgccacctccgcaaaatctgcaagtgaagccaccagtgcttcgtggacagctgcgtcacgtaca

SEQ ID NO: 160 - DNA, 537 bp, synthetic construct
  misc_feature 1..537: note = Description of Artificial Sequence: Synthetic polynucleotide
  source 1..537: mol_type = other DNA
ggtgctagctctactaccactgccaccagcgaatcaggcattacagctagcagtgtcgcgactggagcagctgccgcaatttccaagacagctgctggtagttcgtctataacctatctagcaaggtccttttcgagatcactagtttcctacttgctgcaaagtgccgaattccattccgttttttattccggaatcagctctggtatcgctagtcacatagcttccacggctggtacttctacggctgaatcgttggatttagccagtctcaagtcagtgattgccacagcttgtggtaaggccatggccgcaactaatagtgagggtggtccgcatgcctttgcaaattcactaggaagcgctattactgctgttttgatcgagaatgccattttgacctcagaaaactacgattacttcgcaaaggagtttgcccatattttcagtatttctgctagtaaagtcgtgagtgctacatctgctaagtccgcttctgaagccacatcagctagttggacagcagcttctagaaca

SEQ ID NO: 161 - DNA, 426 bp, synthetic construct
  misc_feature 1..426: note = Description of Artificial Sequence: Synthetic polynucleotide
  source 1..426: mol_type = other DNA
ggtgctggcgctggagctggagtaggtgtgggcggtgcaggcggttacggtcagggttacggtgctggagctggagcaggagctggagctggagctggtgcaggtggagctggaggttacggccagggttatggagctggtgcagcagctgctgctggagctggtgctggtgcagctggtggctacggaggaggttcaggagcgggtgctggtggtgctggaggttatggtcaaggatacggtgcaggttctggagccggtgcgggagccgctgcagcggccggtgcatctgctggagccgctggtggctatggtggaggagctggagttggtgctggagctggcgctggtgctgcaggtggttacggccaatcatacggatcaggtgctggagcaggtgcaggagcaggtgctgctgctgccgca

SEQ ID NO: 162 - DNA, 366 bp, synthetic construct
  misc_feature 1..366: note = Description of Artificial Sequence: Synthetic polynucleotide
  source 1..366: mol_type = other DNA
ggtggagctggtggcggtggacaaggcggacttggatcgggaggagccggacaaggttacggagctggtctaggaggtcagggtggagcctcagccgccgccgctgcagctggtggtcaaggaggtcaaggtggtcagggtggatacggtggattaggatctcagggagcaggtggagctggtcaactgggatatggtgcgggccaggaatcggctgccgcagcagccgctgccgcaggcggtgcaggtggtggtggtcagggaggtttgggtgctggcggcgctggtcaaggttatggagccgcaggtttgggtggacaaggaggagccggccaaggaggtggatctggagcagctgccgctgca

SEQ ID NO: 163 - DNA, 615 bp, synthetic construct
  misc_feature 1..615: note = Description of Artificial Sequence: Synthetic polynucleotide
  source 1..615: mol_type = other DNA
ggtggttacggaccaggttcaggtcaacagggaccgtcacagcaaggaccaggacaacagggaccaggaggccagggcccatatggaccaggtgcatctgcagctgctgctgcggctggcggttatggtccgggatcgggtcagcaaggtcctggtggacagggaccttacggacctggatcttctgcagcagctgctgcagcaggcggcaatggcccaggttctggacagcaaggtgctggacaacaaggcccaggtcagcagggacctggagcatccgccgcggcagctgctgcaggtggttacggacctggttctggacaacagggtcctggtcaacagggacctggaggtcaaggtccttatggtcccggtgcatccgcagcagctgctgctgctggcggttacggaccgggatctggtcaaggtcctggccagcaaggcccaggaggacaaggtccctatggtccaggtgcatcagctgctgctgcagcagcaggtggttatggtccaggatcaggtcaacaaggtccaggtcagcaaggtccaggtcaacaaggacctggtggtcagggtccatatggcccgggagctagtgccgctgctgctgctgca

SEQ ID NO: 164 - DNA, 720 bp, synthetic construct
  misc_feature 1..720: note = Description of Artificial Sequence: Synthetic polynucleotide
  source 1..720: mol_type = other DNA
ggtggatacggaccaggctatggacaacagggtcccggccagcaaggtccgggtggacaaggaccttatggtcctggtgcttcagctgcaagtgctgcatctggtggatatggtcctggttcaggacaacaaggcccaggtcaacaaggaccaggtggtcaaggtccatatggccctggagccagtgccgccgccgctgcagcaggtggatacggaccaggttcaggtcaacaaggtcctggacaacaaggtcccggtcaacaaggccctggacagcaaggaccaggcggacaaggcccttatggaccgggtgcttctgcagctgctgccgccgccggtggttatggtccaggatctggtcaacagggaccaggccaacagggaccaggtcagcaaggtccaggacagcaaggacctggacagcagggtcctggacagcaaggtccaggacaacagggacctggtcagcaaggcccgggccaacaaggtcctggtggacaaggtgcttacggacctggtgcctctgctgccgctggagccgcaggcggatacggtcctggatccggtcagcaaggccctggtcaacaaggcccaggtcagcaaggaccgggtcaacaaggacctggccagcagggccctggtcagcaaggcccaggacagcagggacctggtcaacaaggtccttatggtcccggagcgtctgctgccgcagctgcagca

SEQ ID NO: 165 - DNA, 696 bp, synthetic construct
  misc_feature 1..696: note = Description of Artificial Sequence: Synthetic polynucleotide
  source 1..696: mol_type = other DNA
ggttcgggacctggtggttatggtccagagaatcagggcccctcaggtccgggtggttacggaccgggtggctccggatcctctgccgccgccgccgcagcggccgcttccggacctggcggatatggtcctggctcacaaggtccttcaggaccgggcggtagtggaggttatggtccaggcagtcaaggagcttcaggaccaggtggtcccggtgctagtgcagctgctgcagcggccgcagccgctgcatctggtccaggtggttacggacctggaagtcagggtcctagcggtcctggagcttatggtcctggtggtccaggttcttcagccgctgctgctgccgctgctgcatctggtcctggaggatatggtccaggctcccaaggaccttctggtcctggtgtctatggcccaggaggaccaggatcatccgctgcagctgcagctgccgccggaagtggccctggtggctatggtccagaaaatcagggaccttctggtccaggcggttatggacctggaggttctggatcatctgccgccgcagctgccgctgctgcctcaggaccgggtggatatggacctggatcccaaggcccgagtggtccaggaggatcaggaggatatggaccaggatcccagggaggttcaggaccaggagcttctgcagctgctgccgcagcggctgca

SEQ ID NO: 166 - DNA, 579 bp, synthetic construct
  misc_feature 1..579: note = Description of Artificial Sequence: Synthetic polynucleotide
  source 1..579: mol_type = other DNA
ggttcagcaacatccagtactacaaccactacgaccgtgtcgaagtccgcagccgcagcagcggcagcagcagctgctgcttcatcagcttcctctgcctcgcgtgattctgataggtcaagcactgcagcagaggcttatgctagttcgtctgcctacgctagttctaacttcgagaactacttagcttcagatttgagcaattcagatgaattcgagagtgtctatggctcgctgtattctagtgctgacgctgcgtcgtacgcacgaagtagcgctgagtacgcgtcgaatactttaggattgtccaaagaaacatcgtacgccttagcatccgctgcggctaaagctgtttctgaatccggcagtggttcatcaagttacgctagagcttacgcagttgctaaatcaagcgccgtagtgttacaaaactcgggtgtacttagctcttcaaactcccgatcactcagtagtgccttcgccaaagcttttgcaagttcctccgcatcttcctatgcttcatatcaatcgcgaaacacaggcacatcaagagcaagttcagccggttccggagctgca

SEQ ID NO: 167 - DNA, 579 bp, synthetic construct
  misc_feature 1..579: note = Description of Artificial Sequence: Synthetic polynucleotide
  source 1..579: mol_type = other DNA
ggttctgcaacctcctcaaccactacgactactaccgtatctaaatcagctgctgcagccgctgctgctgccgctgcagctagtagcgcatcaagcgcttcacgagattcggacagatcatcgactgctgcggaggcttacgctagttcgtctgcttatgcttcaagtaattttgagaactatttagcctcagacctcagcaactctgatgaattcgagtccgtctatggtagcgtatattctagcagtgacgccgcttcttacgccagatcttctgccggctatgcaagtaacacattgggtttgtccaaagaaacaagttacgctctagcctcggcggccgcaaaagccgtttccgaatctggttcgggatctagttcatacgctagagcatatgctgttgctaagtcatccgcagctgtgctgcaaaattcaggtgttctttcttctagcaatagccgttccttatcaagtgcctttgctaaagcctttgcttcttcgtctgcatcttcctatgcttcttaccagagtaggaataccggaacatctagagcatctagtgccggaagtggagccgca

SEQ ID NO: 168 - DNA, 579 bp, synthetic construct
  misc_feature 1..579: note = Description of Artificial Sequence: Synthetic polynucleotide
  source 1..579: mol_type = other DNA
ggtagtgcaacaagcagcaccaccactacaactactgtctcaaagtcagctgcggcggccgccgctgccgcagcggctgcatctagtgcctcgtcggcatctagggactccgataggtctagtacaaccgctgaggcgtatgcgtcgtcctcagcttatgcttcatccaactttgaaaattacttggcttccgatctgtctaacagtgatgaattcgaatcagtgtatggtagtgtgtattcctcatctgatgcagcatcgtacgctcgtagcagcgcaggttacgcttctaatacccttggactctccaaggaaacctcttacgctttggctagtgcagctgctaaggcggttagtgagtccggttccggatcgagttcctatgctcgagcttacgctgtagccaaatcttccgcagttgtcttgcagaacagtggagtactctcatctagcaactccagatcgctgtcaagcgcattcgctaaggctttcgcttcatcatctgcctcgagttacgcctcttacaagtctagaaacactggtacttctcgcgcgtcaagtgcaggatcgggcgccgca

SEQ ID NO: 169 - DNA, 579 bp, synthetic construct
  misc_feature 1..579: note = Description of Artificial Sequence: Synthetic polynucleotide
  source 1..579: mol_type = other DNA
ggttccgctactagttcaacaactaccactactactgttagtaagtctgcagctgctgcagccgctgcagcagctgccgcctcatctgcctcgtcagcctccagagattccgatagatcttcaacggcagcggaagcttacgcttcttcctcagcatatgcgtcaagcaatttcgaaaactatttggcttctgatctgtcaaattcagatgagtttgaatctgtctatggatcactctactctagttcagacgcagcatcttatgctagatcaagcgccggatatgcttcaaacaccctcggtctttctaaagaaacttcctacgctttggccagtgctgcagcaaaagcagtttcagagtccggtagtggtagttccagctatgccagggcctacgctgtggcaaaatcttcagcagtcgtattacaaaatagtggcgttctgtcaagctcaaacagtagatctctatccagtgcctttgcgaaagcctttgcttcttcatcagccagttcttacgctagttataaatctagaaataccggtacatctagggcatcctcagccggttcaggagccgca

SEQ ID NO: 170 - DNA, 579 bp, synthetic construct
  misc_feature 1..579: note = Description of Artificial Sequence: Synthetic polynucleotide
  source 1..579: mol_type = other DNA
ggttcggcgacaagttcaactacgaccacaacaaccgtgtcgaagtctgctgcagcggccgcagcagcagctgcagctgcttcgagcgcatctagcgctagacgcgactctgacagatcttcctctaccgctgaggcttatgcttcttcgtctgcttacacctctagtaactttgaaaactacctggcatctgatctatcctcaagtgatgaattcgaatctgtctacggttctctttattcctcttcagacgctgctagctatgctcgttccagtgccgagtacgccagtaataccttgggactatccaaagaaacttcatatgctctggcatcagccgcagcaaaggctgtatcagaaagcggtagtggatccagctcgtatgcacgagcttacgccgtcgctaaatctagtgcagtagtacttcaaaattctggcgtactgtcgagcagtaattctaggtctttgtcctctgcattcgctaaagcatttgcttcctcatctgcttcttcctacgcaagctacaagagtaggaatactggcacatctagagctagttctgccggttcaggtgccgca

SEQ ID NO: 171 - DNA, 579 bp, synthetic construct
  misc_feature 1..579: note = Description of Artificial Sequence: Synthetic polynucleotide
  source 1..579: mol_type = other DNA
ggttcagccacctctagtactacaactactactactgtatcaaagtctgctgcagctgcagcagctgccgccgctgccgcttcgagtgcatcctctgccagccgcgacagcgacagatcctcaaccgcggcagaagcttatgcatcatcctcggcctatgcctctagcaatttcgaaaattatctagcctcagatttgtctaattctgacgaatttgagagtgtgtacggttcgttgtacagctcagcagacgctgcatcctacgctagctcctcaagtgaatatgcctccaatactttaggtctttcaaaggagacatcctatgcattggctagcgctgctgctaaggcggtttcagaaagcggttctggatcttccagttacgctagagcctacgctgtagcaaagagttctgccgttgttttaagaaacagtggtgtgttaagtagcagcaactcaagatcgctgtcatccgcgtttgccaaagccttcgcctctagttccgcttcttcatatgcttcttacaaaagtagaaacaccggaacctcacgtgctagctcggccggcagtggtgcagca

SEQ ID NO: 172 - DNA, 579 bp, synthetic construct
  misc_feature 1..579: note = Description of Artificial Sequence: Synthetic polynucleotide
  source 1..579: mol_type = other DNA
ggtagcgctacatcttcgacaacaactacaactaccgttagcaaaagtgcagccgctgctgctgccgctgcagcagctgcatcctctgcaagtagtgccagaagagattccgacaggtcatcgagtaccgcagaagcttacgcctcctcatcggcgtacactagcagtaacttcgaaaactacttggcttctgatctaagttcttcagacgagttcgagtctgtttacggaagtctgtattcttcttctgatgctgcttcctacgcaagatcatctgcagagtatgcttctaacactttgggcctgtccaaagagacgtcctacgctctggcaagcgccgctgcgaaggcagtttcggaaagcggttctggttcttctagctatgccagggcatacgctgttgctaagtcatctgccgtggttttgcagaattccggtgtcttgagctcctctaattctagatccttatcttctgctttcgcaaaagctttcgcctcttcatcagcttcatcctatgcttcttctaagagcagaaacactggaacttctagagctagtagtgcaggtagtggagccgca

SEQ ID NO: 173 - DNA, 510 bp, synthetic construct
  misc_feature 1..510: note = Description of Artificial Sequence: Synthetic polynucleotide
  source 1..510: mol_type = other DNA
ggtagtgccagatcatctagcgctgctgcggccagcgccgctgctttctcatctttaagtagagccttaatttatcgccttcagcaaaaccaagactttatatacaccttcaactctattgaaacgtccgatgcagcaagggctataacatactcttctgctctggcagccgctaacgctatgggtgcaggctcgtccgcttcccaggctgtagccttcgctgcagctaaagccgctgaaggtgtccctataagaagctcttcatacgcttatgctgaagccatcactaacgcaattactcctcattttttagccctgcatctagtgaatagtgctaacgtcgatgcttttgcctctgactttacttcctcatttgcaagtgccacggcgtccgccgcgagcgcttcagcagctgctagttccgcagcatccgctgctgcagccgcaactgcatcatccagttctaccagtacatcaacaaaaactactagttcggccgcagcagcagca

SEQ ID NO: 174 - DNA, 525 bp, synthetic construct
  misc_feature 1..525: note = Description of Artificial Sequence: Synthetic polynucleotide
  source 1..525: mol_type = other DNA
ggttctgccatttctagcagtgccgctgcagcgagtgcagctgccttttcttctagtctctctcgagccttgatttatagattgcaacagaaccaagatttcatttatacatttaacagcattgaaacctcagacgccgctagggctatcacctatagttctgcactcgctgccgcaaatgctatcggtgctggtagtagcgcatcccaggcggtggcctttgctgctgccaaggctgccgaaggagtaccaataagaagtagctcctacgcctatgctgaggctattacaaatgcaataaccccgcactttcttgcttcccacctggttaatagcgccaacgttgatgcttttgcgtctgattttacaagctcgttcgcatctgcaactgcctcggcagcctcagcatctgcagctgcagcctcatcagctgctagcgctgcatccgctgctactacaaccgcttcctcctctacatcaacttctactacgacaacctcttcgacagcagccgctgccgccgca

SEQ ID NO: 175 - DNA, 525 bp, synthetic construct
  misc_feature 1..525: note = Description of Artificial Sequence: Synthetic polynucleotide
  source 1..525: mol_type = other DNA
ggtgcagctgccagctccagagctagagcacaagctgcagccgcatcctctgctgctgcgtcggcggcagcagcttccagtgcatttgcagaagaactggcatttttgctgtggcaatctcaggacttcatcagtgcttttggatctactgccagttctagcgaagcaaccgcattagctcgttcctcagtaatggcagctgcaagagccgttggagtagctgaggctgcttccgctattgcaagtgctgcggctagtgcagcagcaggtgtctcacacggatcgtccgctgttgcttacgctagagcaattgcctccgccgttgctagagcttttgcccaatttggtatattaactctcagtaatgccgctgcctttggacgccaattcgctagatcctttagctctagcgcagctgcttcggcagcttcagctgcatctgcttcggctgcgagcgcaaaaagcgctgctgctgccgctgcttcttcatccacgacttcaacgagtactacaaccacttccaca

SEQ ID NO: 176 - DNA, 525 bp, synthetic construct
  misc_feature 1..525: note = Description of Artificial Sequence: Synthetic polynucleotide
  source 1..525: mol_type = other DNA
ggtgcagctgctagttcaagaactcgtgcccaggcagctgccgcgagttccgccgccgcaagtgcagctgctgcatcaagtgcattcgcagaggagttaacatttttgttacgacaaagcccgaactttatctcagcctttggttcaacggcttcaagttctgaagctacagctctggccagaagttccgcaatcgctgccgctcgagctgttggagttgcaggagctgcttctgccatagcttctgcagcagctagtgcagcggctggtgtgtcccatggttcttcagctgctgcctatgctagagccattgcttttgccgttgctcaagcttttgccccgtttggaatcctcacattggccaaagctgccgcttttgcttctcaattcgcgcgatcattttcttctagtgctgcggcgtctgctgcttcagccgcttctgcgagtgctgcctcggcgaagtcagccgctgctgcagctgcctcatcatcaactacatccacaagcaccactacaacatccaca

SEQ ID NO: 177 - DNA, 525 bp, synthetic construct
  misc_feature 1..525: note = Description of Artificial Sequence: Synthetic polynucleotide
  source 1..525: mol_type = other DNA
ggtgctgcggcctcctcgagagctcgagcagaagcagctgcggcatctagcgctgctgcttctgctgctgccgccagctctgcctttgccgaggaacttacttttttactacgccaatcccctaactttatcagtgcttttggatccacggctagttcttcagaagcaaccgctttggcaagatcttctgcaattgcagccgctagagccgtgggcgtcgctggtgctgcctctgctatcgcatcagcggcagcgtctgccgctgctggcgtttctcacggatcaagtgctgccgcctatgccagggctatcgcctttgcagttgcgcaagctttcgcaccttttggtatactgactttagctaaggcagcagcctttgctagtcaattcgctagaagcttcagctctagtgctgctgcctccgctgcaagtgcagcatctgctagtgcggcttctgctaagtcggcagcagctgctgcagcatcgagttctaccactagtactagtactacgaccaccagtaca

SEQ ID NO: 178 - DNA, 540 bp, synthetic construct
  misc_feature 1..540: note = Description of Artificial Sequence: Synthetic polynucleotide
  source 1..540: mol_type = other DNA
ggtgctgcgtctgccgccggtgcaagcagtgcagcagcagcatccgcctcggcggcagcagcgagcttcacacaaaatttgatttacagcttgcaagaatccgaaattttttattctgcattaaggagtattgcctcttccggtgaagccagtaacctggcatacttggcagctgagcgagctgcttatggagctggactagacggtattgcaagctcagttgcttcagctgctgcgagcgctttcgctaataccgctttaggttctggagcagccgcctatgcgaaggccctagcatatgctatagcccctgttttaactcgagccaatattattaccctttctaatgctgcctctttggctaccacatatgcaaagggattcgcatctagtgcagccagtgccgcggcctcagccagcgctgcttccgccgctgctgcaagctccgctgcctccgcttcctcagccgcagccgctgcggcggcttcttccagcactagtacaagtactacagtctctcgatctacagccgcagctgca

SEQ ID NO: 179 - DNA, 549 bp, synthetic construct
  misc_feature 1..549: note = Description of Artificial Sequence: Synthetic polynucleotide
  source 1..549: mol_type = other DNA
ggtgctgcctccgcagcaggtgcagctggagcatcctcagctgctgctgcttccgcctctgctgcagctgcttcattcacaagaaacctgatatactctctccaagagtcagagattttctacagtgctttacgaagcattgctagctctggagaagcatcaaatcttgcttacttggctgcagaacgcgcagcatacggtgcaggtttggatggtatcgcaagttcagttgcctccgctgctgccagcgccttcgctaacactgcactgggttcaggtgctgctgcctatgcaaaagctctggcttatgctatcgctcctgtgcttactagagctaacattataacactgagtaatgccgcctccttagctacaacatacgccagaggctttgcctcgagtgccgcctctgccgctgcgagcgcttctgcagcatctgccgcagccgcttcatccgcagcgtccgcatctagtgctgccgccgctgcagcagccagctcctcaacaagcacttccacaacagtgtccagaagcactgcggcagctgca

SEQ ID NO: 180 - DNA, 549 bp, synthetic construct
  misc_feature 1..549: note = Description of Artificial Sequence: Synthetic polynucleotide
  source 1..549: mol_type = other DNA
ggtgctgcaagcgctgcaggagctgctggagcttcctccgcagctgctgcttcagcctctgctgctgctgcatcttttacaagaaacttaatttactcccttcaagaatctgagattttttactcagctttgagatcaatcgctagtagcggtgaagcatcaaatctagcctatttggcagctgaacgagctgcatatggagctggactggatggtattgcttcctccgttgcttctgccgccgcttctgcttttgcaaacacagctttgggtagcggagctgctgcctacgctaaagcactagcctatgcaatcgccccagttttgactagagcgaatattatcactttgtcaaacgctgcaagcctcgctacaacttacgctagaggattcgcttcaagcgctgcctccgctgcggcttctgccagcgcagcttcagcagctgcagcctccagcgctgcttctgcttcttccgctgccgctgctgcagctgcttcttcatccactagcacctccacaacagtttctaggtccactgctgcagccgca

SEQ ID NO: 181 - DNA, 543 bp, synthetic construct
  misc_feature 1..543: note = Description of Artificial Sequence: Synthetic polynucleotide
  source 1..543: mol_type = other DNA
ggtgctgctagcgctgctggcgcagccggagcttccagcgccgctgctgctagtgcctcggcagccgctgcctctttctctaggaacctgatatattcgctgcaagaatctgaaattttttatagcgccttgagatctatcgcctccagcggagaggcatcaaatttggcctatctagctgctgagagagctgcttatggcgcaggtctagatggaatagcttcatctgtcgctagtgctgctgcctctgctttcgcaaataccgcacttggtagtggtgctgccgcctacgcaaaagctcttgcatacgctattgctcctgttttaaccagagcgaatattattactttgtcaaatgcagcaagtttagcaacaacctatgccagaggtttcgcttcttcggcagcttctgccgctgcgtctgcgtccgccgcttctgcggcagcggcttcatctgcagctagcgcaagttccgcagctgcagctgcctcatcttcaacttctactagcacaactgtctccaggtccactgcagcagctgca

SEQ ID NO: 182 - DNA, 525 bp, synthetic construct
  misc_feature 1..525: note = Description of Artificial Sequence: Synthetic polynucleotide
  source 1..525: mol_type = other DNA
ggtgcagcatcagctgctggagccgctggcgcctcatctgccgcagcggcgagtgcgtccgccgctgctgcttcatttacccgtaacttgatctactcacttcaggagtccgagattttctattcagcccttagatctatcgcgtcctcaggagaagcctctaatttggcatatttagctgcagagcgtgccgcttacggagctggtttggacggaatcgcttcttcggtcgctagcgcagctgcatctgcatttgcaaatacagctttgggatcaggtgccgctgcttatgccaaagccttggcatatgcaattgcacctgttcttaccagagctaacataattacgctgtcaaacgctgcaagcctagctactacatacgctaggggttttgcttcttctgctgcctccgctgccgctagtgccagcgcagcctctgcggcagccgccagttctgcagctagtgctagttcctcatctgctgctgctgcagcagcttcatcatctactagtactaaagctaca

SEQ ID NO: 183 - DNA, 507 bp, synthetic construct
  misc_feature 1..507: note = Description of Artificial Sequence: Synthetic polynucleotide
  source 1..507: mol_type = other DNA
ggtgctggagccggcgctggagctggcgccggagcaggctattcggccggcgctggttacggtattggagctggagccggagtgggcgctggtgctggtgcaggcgcaggtgccggatctggtaccggtactggagccggatatggttacggatcttcaacccaatctagctccaccatttacgctgctacctaccagggtggttatggacgagttgcaggcctgggtgccggagctggtgcaggtgcaggtgcaggaggaggtgcaggtgccggagcaggtacaggtgccggagctggagcaggaataggtgctggttatggtgctggcgcgggttatggagccggagctggaaccggctccggagcaggtgccggtgcaggaggaggcgcagcagctggtgctggttcgggtgttggtgcaggctacggtgcaggagctggctatggagccggagccggagccggtggtggagcaggtgcaggagccggaagcggtgcttcagca

SEQ ID NO: 184 - DNA, 522 bp, synthetic construct
  misc_feature 1..522: note = Description of Artificial Sequence: Synthetic polynucleotide
  source 1..522: mol_type = other DNA
ggtgctggatacggtgcaggtgctggtgcaggaggtggagccggagctggtactggatatggtggaggtgctggatacggcacaggctctggtgcaggctacggtgcaggagtaggatacggagcaggcgccggagcaggtggtggagcaggagccggagccggcggtggtactggtgccggagccggtggtggagcaggtgcaggctatggagcaggaactggctatggtgccggagctggcgccggtggaggcgcaggagccggagctggcgctggtgcaggagccggtgctggtgccggttcaggtgcgggtgcaggatacggagccggcgctggttacggtgctggcgctggagctggtggagttgccggcgctggagctgccggaggcgctggagcagcaggtggtgcaggagctgccggtggagcaggtgccgccggaggcgccggtgccggtgccggagctggttctggagctggtgctggtgctggtggtggtgctcgtgctggagccggagga

SEQ ID NO: 185 - DNA, 540 bp, synthetic construct
  misc_feature 1..540: note = Description of Artificial Sequence: Synthetic polynucleotide
  source 1..540: mol_type = other DNA
ggtgctggagccggtgccggatatggagccggagctggttacggagttggtgccggaggcggcgctggcgccggtgcaggagctggtggcggagctggtgcaggcgctggtggaggtgctggagctggagccggatccggcgccggagcaggagcaggaagtggagctggtgctggagcaggtggaggcgccggtgccggtgcaggttcgggtgcaggagccggcgctggttatggcgcggacgcaggtgtaggtggtggtgctggtgctggaaccggttatggtggaggtgccggttatggttctggagctggcgcaggctcaggtgcgggagccggtgctggatatggagcaggagccggttccggaaccggagtgggattcgttgctggtacttctaatagagttgcatcaactacttatagtactatgtacgcaaccggttataatggtggagtcggtgccggagcaggtggaggagccctctctcgtctcttggccgctggttatggagctggtggtggaactgcaacaggtgca

SEQ ID NO: 186 - DNA, 522 bp, synthetic construct
  misc_feature 1..522: note = Description of Artificial Sequence: Synthetic polynucleotide
  source 1..522: mol_type = other DNA
ggtgctggatatggcgccggagctggcgctggtgctggttccggagcgggattaggtgcgggcgcaggtgctggtttcggtgctggagctggcgccggtgtatcagcaggagcaggtgcaggtattggagcaggagctggtgctggtgtcggagccggagctggtgccggcttcggagccggagcgggcgcgggtgttggagctggtttcggcgccggtgccggtgctggtgtaggagccggtgccggtgcaggcgttggagctggagccggtgctggttctggtgcaggagtcggtgctggtgttggagcgggatttggtgctggcgtaggcgcaggagttggtgcaggcgcaggagcaggcgcaggcgtcggagctggagctggagtgggagccggtgcaggagccggtgtaggtgctggtgctggcgcaggagttggagctggtgccggagctggtgttggtgctggagcaggtgctggctttggcgcaggagtgggagcaggcgtcggagccggagca

SEQ ID NO: 187 - DNA, 474 bp, synthetic construct
  misc_feature 1..474: note = Description of Artificial Sequence: Synthetic polynucleotide
  source 1..474: mol_type = other DNA
ggtattggtgctggcgccggtgcaggatccggagttggtgcaggagctggcgcaggtagtggaaccggaaccggtgcaggttacggttacggctcttcagcacagtctctctccactcgttattctggagcttatcaaggtagttacggaggtgccggtgctggagctggtgcaggtgcaggagccggtgctggtgctggttctggcgcaggagctggctccggaactggatatggtgccggatcaggtgctggtgccggtgctggtagcggttctggagccggtgctggcaccggcgctggatatggtgctggttcaggcgctggagttggcgttggagccggtgccggttctggttacggcgccggaggaggtgctggagccggagcaggagctggtggaggagctggagctggtaccggtggcggtactggagcaggtgctggtgctgtatacggtgcaggtgccggtgca

SEQ ID NO: 188 - DNA, 477 bp, synthetic construct
  misc_feature 1..477: note = Description of Artificial Sequence: Synthetic polynucleotide
  source 1..477: mol_type = other DNA
ggtgctggactaggtgctggtactggcgccggtgccggagctggtgcttctgctggaacaggaacgggatatggtcttggcagatacgcccaaggtaccagtgtcacatactcctccacctacggtaatggttactacggaggtttgggagctggatctggaacaggtgctggaggtggtgccggtgcaggagctggatccgccgctggtgccggtgctggtgccggctcaggcgcaggtttaggtgctggtgctggagcaggtgcaggtgcgggctttggtgcaggtgctggtgcgggtgtcggagcaggagctggtgctggaatcggtgctggagcaggagcaggtgttggcgccggagctggagccggctttggcgctggagtaggtggtggtgctggtgctggttccggagctggtgttggtgccggagtgggagctggtgtaggagccggtgcagtggtaggagctggagca

SEQ ID NO: 189 - DNA, 540 bp, synthetic construct
  misc_feature 1..540: note = Description of Artificial Sequence: Synthetic polynucleotide
  source 1..540: mol_type = other DNA
ggtgcctattctgcagctgctgccgctgcagctactgctacatccggcggagcccctggaggttatggcggttatggcccaggtattggtggtgcctatggtccggcttcttccaccggaacaggtagtggcagtggctcaggcgccggcgctgctggaggaggaggatctggcggtcttggttcaagtggtggaaatggtggtttgggaagcggaaacggaggttctggtgcatcagcagctgcatcggcttctgccgcgagctcatcccctggaagtggaggctacggtccaggacagggagccggattcggctctggctcggcagctgctggtggatctggcacaggctcaggtgccggtggtcctggatcaggaggctatggtggacctcaattttttgcatccaacacgttcgcctcagcctacggaggtcaaggtctattaggaacatctggatatggcactggtcaaggtggagcttctggaactggctcctctggtggcggcggttcaggttcaggaacgggatctaactca

SEQ ID NO: 190 - DNA, 525 bp, synthetic construct
  misc_feature 1..525: note = Description of Artificial Sequence: Synthetic polynucleotide
  source 1..525: mol_type = other DNA
ggtgcttcttcggctgctgcagctgctgctgctaccgctacatcgggaggagctccaggtggatatggaggatacggtccaggcatcggtggtgcatttgttcctgcttccactacaggtactggctccggctccggttccggtgctggagctgcaggttcaggaggacttggtggacttggttcatccggaggaagtggaggactaggtggtggaaacggaggatccggagcctcagctgccgcttctgcggcagctgcttcttcatcacctggtagtggaggttatggacctggacagggagtaggatctggaagtggcagcggtgcagcaggaggatcaggaaccggttctggtgcaggaggtccaggatcaggtggatacggtggtccacaattttttgcatcggcctacggtggtcaaggcttacttggtacatctggatacggtaacggtcaaggaggtgcctcaggaacgggtagcggaggagtgggaggttcgggatcaggagctggttctaattca

SEQ ID NO: 191 - DNA, 699 bp, synthetic construct
  misc_feature 1..699: note = Description of Artificial Sequence: Synthetic polynucleotide
  source 1..699: mol_type = other DNA
ggtggtgccggtagcggacaaggaggttacggtggacagggtggcttgggaggttatggccaaggcgctggagccggtgcagccgccgctactgctgctggaggtgctggatctggtcaaggagactacggtgaccagggaggcctgggaggatatggtcaaggatctggtgccggttcagctactgctcctgcagctggaggttcaggttttggacaaggtggattcggtaatagaggtggaaaaggtgcctatggacaatccgctggtgctggtgtcggcgctgcggccacagccgccgctggaggagcaggatcaggccaaggcggttatggtgaccaaggaggtttgggaggttacggacagggtgcaggagccggtgccgcatcggctgccgccggtggtggtgatggctacgaacaaggtggttacggtaaccaaggaggacttggcagttttggacaaggcgccggtgctggagctgccgctgcggcctccgccggaggtgccggatctggtcgaggtggatatggagatcagggtggtttgggtggttacggccaaggagctggtgctggagctgcttccgccgctgccggaggaggcgacggttatggtcagggctattatggcgatcaaggtggtagaggaggttatggtcagggttctggtgctggcagtgctacggcagctgctgca

SEQ ID NO: 192 - DNA, 834 bp, synthetic construct
  misc_feature 1..834: note = Description of Artificial Sequence: Synthetic polynucleotide
  source 1..834: mol_type = other DNA
ggtggtgcaggtttcggtcaaggcggatacggtcagggtggctatggcaaccaaggaggtttgggatcctttggacaaggtgctggtgctggcgccgctgccgccgcatcagcaggtggtgctggtagtggaagaggtggatacggcgaccaaggaggtttaggtggttacggccaaggtgcaggagcaggagcagcagctgctgcagcaggaggtggagatggatacggtcagggaggttatggaaaccaaggaggcctaggctcattcggtcagggagccggagccggtgccgcagctgccgcctctgctggaggtgccggctcaggacgtggtggttatggacaaggaggttatggcaaccagggtggtttaggttcattcggacaaggagctggcgctggtgccgccgccgctgcatccgcaggtggtgcaggttctggacgtggcggttacggcgaccagggtggattaggaggttacggtcagggcgctggatctggtgccgctgctgctgcagccggaggaggtgacggttacggacaaggcggatatggtaaccagggtggactcggttcctttggtcaaggtgctggagctggtgctgctgccgcggcatcagctggtggtgccggatcgggtcgtggtggatatggccaaggtggatacggaaaccagggtggactaggatcttttggacagggagcaggagcaggtgcggctgccgctgcatcagctggaggagccggatcgggtaggggaggatatggagatcaaggtggtctgggtggctacggtcagggtgccggagctggtgctgcctctgcagctgca

SEQ ID NO: 193 - DNA, 507 bp, synthetic construct
  misc_feature 1..507: note = Description of Artificial Sequence: Synthetic polynucleotide
  source 1..507: mol_type = other DNA
ggtggtggagatggctacggccaaggtggatacggtaatcaaagaggagttggatcctatggtcagggcgctggcgctggtgcagctgccacatctgccgcgggaggcgctggtagcggaagaggtggttacggtgagcaaggaggccttggaggttacggccagggagctggtgctggagcagctagtaccgctgcgggaggtggtgatggatatggtcaaggaggatacggtaaccaaggtggacgtggttcttacggacaaggatctggagcaggtgcgggagccgcagtagctgcagcggccggcggtgctgtttcaggccaaggaggttatgatggtgaaggtggtcaaggtggttatggtcagggatctggtgctggagctgcagttgctgccgcctctggtggaaccggcgctggtcaaggaggttacggctctcaaggttctcaagcaggttacggtcagggtgctggttttagagcagctgctgctaccgcggctgca

SEQ ID NO: 194 - DNA, 489 bp, synthetic construct
  misc_feature 1..489: note = Description of Artificial Sequence: Synthetic polynucleotide
  source 1..489: mol_type = other DNA
ggtgcatatgcttatgcatatgctattgctaacgcatctcagattgcagcttccgttgcctcagctgttgcctcaagcgcatcagctgcggctgccgctgcatcgagcagtgctgcagccgctgctggtgcatcctcggcggctggagctgcatcctcttcgtccactaccacaacaactagtacttctagctctgccgctgctgcagctgcggcagcggcagccgcttcagcaagtggagcttcaagtgcgtctgctgctgcatctgcttctgctgccgcttctgctttttcctcagccctaattagcgatctacttggtatcggagtctttggaaacacctttggctctattggttccgcttcagcagcttcatcgatagccagtgctgccgcacaagctgccttaagtggattaggtttgtcctacctagcttctgcaggtgcatcagcagtggcctcggccgttgccggagtgggtgttggagca

SEQ ID NO: 195 - DNA, 492 bp, synthetic construct
  misc_feature 1..492: note = Description of Artificial Sequence: Synthetic polynucleotide
  source 1..492: mol_type = other DNA
ggtgcttacgcgtatgcttatgctatcgccaacgctttcgccagtattttggcaaatacaggattactgtcagtttcgtcagcagcctctgttgcttcttctgtggcttcggccatagccacctctgttagttcatcttctgctgctgcagccgcttcagcttccgctgcagctgcggcaagtgcttcggcagcaagttcagcttcagcctcatcgtccgcaagtgctgcggccgccgcaggtgcctctgccgccgctggtgcggcatcatcggcgtctgcaagcgccgccgcctccgcatttagcagcgcgttcatatctgctcttctaggtttctcacaatttaactcggtgttcggttctattacatccgctagcttgggattgggaatcgctgctaacgcagttcagtcaggactagcgtcactaggtctaggtgctgctgcatcagccgctgcctctgcagttgccaacgcgggcttaaatggctca

SEQ ID NO: 196 - DNA, 534 bp, synthetic construct
  misc_feature 1..534: note = Description of Artificial Sequence: Synthetic polynucleotide
  source 1..534: mol_type = other DNA
ggtgcttatgcttacgcgacggcaattgcttcagcgattggtaacgcactattaggtgcgggattcttgacagctggaaacgctagccagatagctgcttctgtagcaagtgctgtggcatcatcggcatcagccgccgctgcagcagccagttctagcgcggccgcagctggtgctagctctgctgctggagcagcttcatcctccagtacaaccactaccacatctacttcatcgtcggcagctgctgctgcagctgccgctgctgccgcatccgcttcaggtgcctcttctgcgagcgcagcggcttctgctagtgccgctgctagcgctttcagtagcgctttgatcggtgacttgttgggtataggtgtattcggaaataccttcggatctatcggtagcgcatccgctgcttcaagtattgcttctgctgctgctcaagctgcattgagcggacttggactgagttatcttgcttcagccggtgcctcagccgttgccagcgcagtcgccggagttggcgtgggagca

SEQ ID NO: 197 - DNA, 756 bp, synthetic construct
  misc_feature 1..756: note = Description of Artificial Sequence: Synthetic polynucleotide
  source 1..756: mol_type = other DNA
ggtgcgggcgctggagctggtgccggcgccggagccggagcaggcgctggttccggcgcttctactagcgtctcaactagcagtagttcaggtagcggtgcgggtgcaggagctggttctggtgctggttctggagcaggtgccggatctggtgctggagccggtgcaggtgcaggtggtgcaggcgctggtttcggatctggtctgggtctaggatacggcgtgggcttatcttctgcacaagcgcaagctcaggcccaagcagctgctcaagctcaagctcaagcacaagcacaggcttatgccgctgcacaggctcaagcacaggcccaagcccaagcgcaggctgcagcagctgcagctgctgccgctgctgctggtgcaggtgctggtgctggcgctggtgctggtgcaggtgccggtgccggttccggagcttcgaccagtgtaagcacatcttccagctccggctccggtgctggtgccggagcaggatcaggtgctggttcgggtgctggtgcgggatcaggtgctggagcaggagctggtgccggtggtgctggagctggattcggtagcggacttggacttggatatggtgttggcttaagctcagcacaagcacaagctcaagcccaagctgctgcacaggctcaggctcaagctcaggctcaagcctacgctgctgctcaagcccaagcacaagcccaagcccaggcccaagctgcagctgccgctgctgccgcggccgccgca

SEQ ID NO: 198 - DNA, 756 bp, synthetic construct
  misc_feature 1..756: note = Description of Artificial Sequence: Synthetic polynucleotide
  source 1..756: mol_type = other DNA
ggtgcaggtgcaggtgctggtgccggagcaggagcgggagctggagcaggttccggtgccagtacctctgtctcgacctcatcatcttctggaagtggtgctggagctggtgcgggatccggtgctggatctggtgcgggtgcaggaagcggtgctggtgctggcgccggtgcaggtggtgcaggagcagcttttggaagtggtttaggattgggttatggagttggattgtcctccgcacaggctcaggcgcaagcacaagcagctgcccaagctcaagctgatgctcaggcacaagcctacgcagccgcccaggctcaggctcaagctcaggcccaggctcaagctgctgcagctgccgccgcagctgctgctgctggcgctggagcaggtgcaggcgctggttccggagctggagcaggagctggatcgggcgcatctacctccgtctctacctcatcttcttcaggttctggagctggcgcaggagccggttctggagccggttcgggtgctggcgctggatccggagctggtgcaggagcaggtgctggaggagcgggtgccggtttcggaagtggacttggtcttggttacggagttggtctgagttctgctcaggcgcaagcccaagctcaagcagctgcacaagcgcaggctgacgcacaagctcaagcctatgccgctgctcaagcacaagcccaggcccaggcacaagctcaggcagccgcggccgccgctgctgcggcagccgca

SEQ ID NO: 199 - DNA, 756 bp, synthetic construct
  misc_feature 1..756: note = Description of Artificial Sequence: Synthetic polynucleotide
  source 1..756: mol_type = other DNA
ggtgctggagccggcgctggtgctggatctggagctggtgcaggagccggttcaggtgcctcaacaagtgtctctacaagttcttctagtggttcaggtgctggtgctggtgcaggatctggagccggatctggtgctggcgcgggtagtggagctggcgcaggagctggtgcgggtggcgccggagctggcttcggctccggtttgggacttggttacggcgtaggtctttcttctgcacaagctcaagcgcaatctgctgcagcagctagagctcaggccgacgctcaggcacaagcatacgctgctgcacaagcacaggcccaggcccaggcacaggcacaagccgccgcagctgctgccgctgctgctgctgcaggagctggagcgggcgctggtgccggagcaggagctggtgctggagcaggttcaggagcatcaactagcgtttccaccagttcctcatcagcttctggtgctggtgctggcgccggtagcggagcgggttctggagccggtgccggttccggagcaggtgcaggagccggagctggcggcgccggcgcaggttttggaagtggtttgggtcttggctacggtgtaggattaagctcagcccaggctcaagctcaagcacaagccgctgcccaggctcaggctcaagctcaggcacaagctctcgccgctgctcaagctcaagctcaggcgcaagctcaagcccaagctgccgctgccactgcagcggctgctgctgca

SEQ ID NO: 200 - DNA, 582 bp, synthetic construct
  misc_feature 1..582: note = Description of Artificial Sequence: Synthetic polynucleotide
  source 1..582: mol_type = other DNA
ggtcaaggaacggactctgtcgcaagcagcgcttcttcctctgctagtgcctcttcttcagccacgggaccagataccggatatcctgtaggttactatggtgctggacaagccgaagctgctgcttctgctgccgccgcagcagctgcttccgctgctgaggctgctacgattgccggtttgggttacggtagacagggacagggaactgattcatcagcctcttctgtttctaccagtaccagtgtcagttctttggcaacaggacctggttcgcgatatccagtgagggactatggagcagatcaagcagaggccgccgcatcagccgcagccgccgcttctgccgctgaggaaattgcttctttaggttatggtcgtcagggacaaggtacagatagtgtcgcttccagtgctagttcatctgcaagcgccagtagctcagccactggaccggatacaggttaccccgtaggttattacggagccggacaggccgaggctgctgcatcagctgcggctgccgctgccgccagtgccgctgaagccgctactatcgcaggtttgggatatggtagacaa

SEQ ID NO: 201 - DNA, 594 bp, synthetic construct
  misc_feature 1..594: note = Description of Artificial Sequence: Synthetic polynucleotide
  source 1..594: mol_type = other DNA
ggtcagggaacagattcttcggcttcatcggtatccacctctacctctgtatcttcctctgctactggacctgatacaggttatcctgtcggatattacggcgctggacaggcagaagcagctgccagcgctgcagcggcagccgctgctagcgcagccgaagccgccacaattgccggacttggttacggcagacaaggtcagggaaccgacagctcggcctcttctgtatcaactagtacttcagtgagtagttcagctactggtccagatatgggttatccagtgggaaactatggagcaggacaagctgaagccgccgcttcagctgctgctgcagccgctgcatccgcagcagaggctgcgactattgcatctcttggatatggccgtcaaggacagggtactgattcatccgctagctcagtctctacaagtacctctgtctccagttctgcaactggtccaggttcacgttatcctgttagggattatggagctgaccaggccgaggctgctgctagtgccgcagcagcagcagctgctgcagcctctgctgcagaggaaatcgccagtctgggatacggtaggcaa

SEQ ID NO: 202 - DNA, 594 bp, synthetic construct
  misc_feature 1..594: note = Description of Artificial Sequence: Synthetic polynucleotide
  source 1..594: mol_type = other DNA
ggtcagggcacagactccgttgcgagctcggcttcttcatctgcatctgcaagctcttcagcaacaggtcctgataccggttacccagttggatattatggagcgggtcaagcagaagctgcagctagtgccgcagcagccgccgctgcatccgctgctgaggcagccactattgcaggtttgggttacggacgacaaggacaaggtacagattctagtgcatctagtgttagtacctccacatctgttagctcttcagctacaggaccaggatccaggtatccagtcagagattatggagcagaccaagcagaggccgcagcctctgctaccgccgcagctgcagctgccgctagtgctgctgaagaaattgctagtcttggttatggacgccaaggacagggaacagacagtgttgcatcctctgcctcctcgtccgcttctgcatcatcgtcagccaccggtcctgatactggttatcctgtcggttactacggagctggtcaagccgaggctgcagcttcagccgcagcggcagctgctgcttcagccgctgaggccgccaccattgctggtctaggatatggtcgacaa

SEQ ID NO: 203 - DNA, 621 bp, synthetic construct
  misc_feature 1..621: note = Description of Artificial Sequence: Synthetic polynucleotide
  source 1..621: mol_type = other DNA
ggtgtctccctatctagttctcaggctacatcggtggctagcgcaattagcagttccttgtatgcttttaactaccaagctagtgccgcttcatcagctgcggctcaatccagtgcccaaacagcaagtaccagtgctaagcagacggctgcgtcaacttctgcatccacagcggccaccagcacaacgcaaacagctgcaacaacctcagcctcaacagccgcatcgagtcaaacagtacagaaggcttctacatcaagtgccgcatccaccgcagcaagcaagagccaaagttcttctgccggctcttcaaggactacatctacagccgcagcctctgcaagcagctcttacgctttcgctcagtcgttatctcaatacttactgtcgtcgcagcagttcaccaccgcttttgcctcttccactgcagtggcatcctcccagcaatatgctgaggccatggctcaaagcgtggcaacgtcgttgggcttgggatacacttatgccagcgcactctcggttgccatggcccaagctatttctggagtcggtggtggtgcttctgcttactcatatgctacagccatttcacaggcaatatccagggctttgacatcttca

SEQ ID NO: 204 - DNA, 618 bp, synthetic construct
  misc_feature 1..618: note = Description of Artificial Sequence: Synthetic polynucleotide
  source 1..618: mol_type = other DNA
ggtgtctctctttcttcttcgcaagctacttctgtagcttctgcaatcagcagctcattatacgcatttaattatcaagcttctgccgctagttccgctgcagcccagagctctgcccagaccgcaagcacatcagctaagcagaccgcggctagtacgtcagcatccacggctgctacatctaccacccaaacggctgcgaccactagcgcttctactgctgcctctagtcagacagtccaaaaagcctccacgagttctgcagcaagtacagcagcgtcaaagagccaatcttcttctgtgggtagttccacaacctcgactgcagcagcttccgccagttcttcatacgcttttgctcagtctttgtcccaatatttgttgagttctcaacaatttacaacggcttttgcaagttccaccgctgttgctagttcacaacaatatgctgaagccatggcccagagtgttgctactagcttaggacttggatacacctacacttcggccctgagcgtcgctatggctcaagcaattagcggtgtcggcggaggagcctctgcttactcctacgccactgccatttcacaggcaatttcaagagttttaacttcttca

SEQ ID NO: 205 - DNA, 618 bp, synthetic construct
  misc_feature 1..618: note = Description of Artificial Sequence: Synthetic polynucleotide
  source 1..618: mol_type = other DNA
ggtatatccctgtcgtcaagtcaagctacttccgtggccagtgctataagttcttctctatacgcttttaactatcaggcttctgccgcttcatcggctgccgcacagtcatctgcgcaaacggcaagtacgtccgctaaacaaactgctgcttctacctctgcctctacagctgctacttcaacgacacaaacagctgccacaacctcggctagtacggctgctagttcgcagacagttcaaaaagcgtcaacttcttccgccgcctctaccgcagcatctaaatcacaatcttcctccgtgggttcaagcactacatctacagccgctgcgtcggcgtcctcttcgtatgcttttgcccaaagtttgtctcagtatctcttgtccagccaacaatttacaacagcttttgcaagctcaactgccgttgcttcatctcaacagtatgccgaagctatggctcagagtgtcgccacttcgttaggcttgggttacacttatacatccgctttgtccgtggcaatggcacaggccatatctggagttggtggtggagctagtgcttacagttatgctaccgccatttctcaggctatatcaagagtgctaacttcgtca

SEQ ID NO: 206 - DNA, 543 bp, synthetic construct
  misc_feature 1..543: note = Description of Artificial Sequence: Synthetic polynucleotide
  source 1..543: mol_type = other DNA
ggtagcagtgcatacgactctcaattcagtgagagctcatctgcctcgtctgctgcagccagtgccttctcggaacagacctcctacgacatatcctcggatctttcttccgcatcaagtgctactgccgcagccgcgtcgtcgtctgcatatgaatcacaattctctgatgcttcttccggttcatcggcagcagctgcggcaagtagtcaacagaattcatacgatactgacgccttgtattctgcttcatctgctgcctccgcagctgcttctgcaagtgcatacgaactagagttttcagatgcatcttcatcgtctagtgctgtcgcagttgcatcttcacaacagggctcatacgatacctcctcagacttttctagtgctagttccgctgctgccgccgcagcttctgcttatgagtctaagttcttggatgcttcttcatctagctcggctgccgctgcagcaagttctcaacaatcatcatatgagacgagttcagacctcgtatctgctagttcagctgccgctgctgcggca

SEQ ID NO: 207 - DNA, 531 bp, synthetic construct
  misc_feature 1..531: note = Description of Artificial Sequence: Synthetic polynucleotide
  source 1..531: mol_type = other DNA
ggtgcatcagcatatcagtcgcagttcttggatgcttcatcttcgtccaacgcagctgctaccacttcctcaagacaatccagttatgataccagttcagacttttcctcggcttcaatcgcagccgccgcagcggctagtgcctcatcatacgagagtcaattttcagatgcatccagttcctctaatgccgcagcggcagcctcgtcccaacaatcgtcttatgatacatcatctgatctggtttctgcagcttcggcgtctgcctacgaatcccagttcctagatgcttcctcaagtagtaatgccgccgctactacaagtagtcagcagtcctcctatgatacttcatcagatttctcttccgcttctattgctgctgctgccgctgcgagtgcttcatcgtacgagtcccaattctctgatgccagctcttcttccaacgccgccgctgcggcaagttcccaacagtctagctatgatacatccagcgatttggtgagcgctagttcagctgctgctgcagctgca

SEQ ID NO: 208 - DNA, 684 bp, synthetic construct
  misc_feature 1..684: note = Description of Artificial Sequence: Synthetic polynucleotide
  source 1..684: mol_type = other DNA
ggtgcttcatcttacgagtcacaattttccgacgcatcttctagtagtaacgccgccgcggcagcttcgtctcaacagtcatcatacgatacctcttctgacttagtctctgcttcttctgccgcagctgccgccgctagtgcttcagcttatgaaagccagttcagcgacgcttcttcatctcgaaatgctgccgcagctgcatcgtctcaacaaagctcctacgatacttcatccgacttggtatctgcatcatccgccgctgcagccgctgcctcagcaagctcttacgaatctcaatttttagatgcctcttcctcgtctaacgctgccgctaccacttcatctcagcaatcctcatatgacacgtcatcagattttagtagtgcttccattgcggctgctgtagccgcctctgccagctcttatgaatctcaattttccgatgcctcttcatcgagtaaagccgcagctgcagcaagttcccaacagagttcttacgatactagcagtgatttagtttccgccagtagtgcagctgcagcagccgcgagtgcttctagttacgaatcacagttttctgatgcgagttcgagttccaacgcagccgccgccgcatccagtcaacagtcatcctacgatacctcaagtgacttttccagtgctaattccgccgcactggca

SEQ ID NO: 209 - DNA, 717 bp, synthetic construct
  misc_feature 1..717: note = Description of Artificial Sequence: Synthetic polynucleotide
  source 1..717: mol_type = other DNA
ggtgctgcgcagaaacagccatcaggagagtctagtgttgccactgcaagcgcggctgcaacctcagtgacctcaggtggagcaccagttggaaagccaggtgtcccagcaccaatattttaccctcaaggtccgttacagcagggacctgcacctggaccttccaacgtccagcctggtacctctcagcaaggtccgatcggtggcgttggtggctcaaatgcgttttcgtcgtcattcgccagtgccttatccctaaaccgaggttttacagaagttatcagctctgcttccgcaacggctgttgcaagtgcttttcagaagggtctagctccatatggaactgccttcgctctgtcagcagcttccgcggctgctgatgcgtacaacagcattggatccggagctaatgcattcgcatatgctcaagcttttgctagagttctgtatccattggtcagacaatatggactatctagctctggtaaagcatctgcgttcgcctcagctattgcttcttctttctcttccggtacttctggacaaggaccgtccattggacagcaacaaccaccagtaactatttctgccgcctcggcctcagctggagcttcagctgcagccgtaggaggtggtcaagttggtcagggaccgtatggtggacaacaacaatccactgctgcctcagccagtgctgcagcagctactgccacatca

SEQ ID NO: 210 - DNA, 717 bp, synthetic construct
  misc_feature 1..717: note = Description of Artificial Sequence: Synthetic polynucleotide
  source 1..717: mol_type = other DNA
ggtgctgcccagaaacaacctagtggtgagagttccgtagctactgcatctgcagcggccacttcagtgacttcgggtggtgctcctgtaggaaaacctggtgtacctgccccaatattttacccacaaggtccgttgcaacagggcccagcaccgggtccatcgaacgtccaacctggaacatcccagcaaggtccaattggtggtgtgggaggctctaacgcgttctcctcttcctttgcaagcgctctgtctttaaaccgaggtttcactgaagtgatatctagtgcttctgcaacagcggtggcttcagcgttccaaaaaggattagccccttatggcaccgcctttgcattgagcgcggcctctgccgctgccgatgcctataatagtatcggcagtggagctaatgctttcgcctatgcgcaagcattcgctagagtcctttacccacttgtgaggcagtatggtttaagttcgtctggaaaagctagtgcttttgcgtcagcaattgccagttcattctcttcaggtacttcgggtcaaggaccttctattggacagcaacaacctcctgtcacaatttctgctgcctctgccagtgctggcgcttctgcagcagctgtgggcggcggtcaggttggtcagggcccatacggtggacaacagcagagtactgcagcctctgcttcagcagcggccgccacagcaacttca

SEQ ID NO: 211 - DNA, 717 bp, synthetic construct
  misc_feature 1..717: note = Description of Artificial Sequence: Synthetic polynucleotide
  source 1..717: mol_type = other DNA
ggtgctgctcagaagcaaccatcgggagaaagttccgtagcgactgccagtgcggctgcaacatctgtgacttccggtggtgctcctgtaggtaagccaggagtgcctgcacctatcttctatccacaaggtccactacaacagggtcctgctccgggaccatctaatgtgcaaccaggtacgtcccaacagggacctattggtggtgtgggaggaagcaacgctttttcttcctcatttgcatcggctctttccctaaaccgcggatttactgaggtcatttcttccgcttctgctactgcagtggcctctgcttttcagaaaggtcttgccccatatggcactgctttcgcgctctcagcggcttcggctgcagctgatgcttataattccattggtagtggagctaacgcttttgcatacgctcaggcatttgccagggtattatacccattggttcagcaatatggtctttcttcaagtgctaaggcttcagcttttgcttctgcaatcgcatctagcttttctagcggtacatctggacagggaccaagtattggacaacaacagccaccggttacgatttctgctgccagcgcttcagcaggtgccagcgcagccgcagtcggaggtggtcaggtcggtcaaggcccgtatggtggtcaacagcaatcaacagctgcatcagcatctgccgcagctgccactgctacctca

SEQ ID NO: 212 - DNA, 717 bp, synthetic construct
  misc_feature 1..717: note = Description of Artificial Sequence: Synthetic polynucleotide
  source 1..717: mol_type = other DNA
ggtggtgctcaaaagcaaccatcaggtgaaagttctgtagctactgcttcggctgcagctactagcgttacctcagcaggtgctcctgtaggcaagccgggagtacctgcaccaattttttacccacaaggtcctctacaacagggtccagctcctggtccctcgaacgtccagccaggtacaagtcaacaaggtccaattggtggtgtgggtggaagtaatgccttcagtagcagtttcgcctcagccctctcattgaacagaggattcaccgaagtgatcagtagtgcctccgccaccgctgtggcatctgcttttcaaaaaggtctagctccttacggtacagcatttgctttatctgctgcctccgctgcagccgatgcctataatagcatcggatctggagctaacgcttttgcctatgctcaggccttcgccagagtattatacccattagtacaacaatacggactttcttcgagtgctaaggctagtgctttcgcatctgcaattgcatcatcatttagttcaggaacttctggtcagggtccatctaacggtcaacaacagcctccagttaccatatctgcagcatcagcttcagctggtgcctcagcagctgctgtcggaggaggtcaggtttctcaaggaccatatggtggacaacagcaatccacagctgcctctgcaagtgccgctgctgctaccgcaacttca

SEQ ID NO: 213 - DNA, 717 bp, synthetic construct
  misc_feature 1..717: note = Description of Artificial Sequence: Synthetic polynucleotide
  source 1..717: mol_type = other DNA
ggtggtgcacagaaacaaccttctggtgaaagttccgtcgctactgctagcgctgccgcaacttcggttacgtctgctggagctcctggcggtaagccgggtgtaccggctcctattttctatcctcaaggtccgctgcaacagggaccagcgccaggaccttctaatgtgcaaccgggaacctctcaacaaggaccaatcggaggcgtaggtggaagtaatgctttttcttcttcattcgcctctgctctttctctcaaccgtggttttacagaggtaatatcatccgctagcgctaccgcagtggcaagtgcttttcaaaagggtcttgctccatatggaactgcttttgccttgtctgctgctagtgcggctgctgatgcttacaactccataggctcaggagccaatgcttttgcttacgctcaagcatttgctcgtgtattgtatcctctggtacagcaatacggactttcatcatccgcaaaggcctcagcctttgcctcagctatagcatcttcgttctctagtggtactagcggccaaggaccttcgattggccaacaacagccaccagtcactatttcagcagccagtgcttcagctggagcatctgctgcagcagtcggtggcggtcaagtaggtcagggaccatacggaggtcagcaacaatcaaccgctgcttccgcttctgctgcggcggcaacagcaacctca

SEQ ID NO: 214 - DNA, 726 bp, synthetic construct
  misc_feature 1..726: note = Description of Artificial Sequence: Synthetic polynucleotide
  source 1..726: mol_type = other DNA
ggtggcgcacagaagcagccttcaggtgagagttccgtcgcaactgcttcagctgctgcaacatcagttacctctgccggtgctccagtgggaaaaccgggtgtacctgcacctattttttacccacagggtccactccaacaaggaccagcacctggaccttcatacgtgcagccagctactagccagcagggtcctattggtggagccggacgttctaacgcgttttcctcatcattcgccagtgctctgtcaggaaatagaggtttttctgaagttatctcttctgcgtccgcaacagccgtcgcatcggcttttcaaaagggtttggctccctatggtaccgcatttgcattaagtgcagcttcggctgccgccgacgcatacaacagtattggaagcggcgccaatgctttcgcatacgcgcaagcttttgccagagtgttgtaccctttggtacaacaatatggtttgtccagcagtgctaaagcatctgctttcgctagtgcaatcgcatcatcattttcttcgggcgccgcaggacagggtcagtcaattccgtatggaggacagcaacaaccacccatgaccatttcagccgcttctgcatctgcaggtgcttccgctgcagcagttaaaggaggtcaggttggacaaggtccatacggaggtcaacaacaatcaacggctgcatcggctagtgccgctgcaacgactgccacagca

SEQ ID NO: 215 - DNA, 735 bp, synthetic construct
  misc_feature 1..735: note = Description of Artificial Sequence: Synthetic polynucleotide
  source 1..735: mol_type = other DNA
ggtggtgcacaaaaacatccatccggtgaatactccgtggcaacagcaagcgctgctgccacctccgtaacatctggaggtgcacccgtgggcaaaccaggtgtccctgcaccaatcttctatccacaaggacctttgcagcaaggtccagctcctggtccatcgaacgttcaacctggtacgtcacaacaaggtcctatcggaggtgtcggagaatctaacacgttctctagttcatttgctagtgcattgggaggaaacagaggtttttcgggtgtaatttcttccgcatctgccaccgcagtagctagcgcctttcaaaaaggcttggcgccttatggtaccgctttcgccctttctgcagcatcggcggccgctgatgcatataacagcatcggttccggcgcatctgcatcagcttacgctcaggcctttgctcgagtgttgtacccattgttacagcaatatggactatcatctagtgccgacgctagcgctttcgcatctgctatagcctcctcattctcaactggtgtagctggccagggtccgtctgttccttatgtaggacagcagcagccttctataatggttagtgctgcaagtgcttcagctgctgcatctgccgctgcggtaggtggaggtcccgtggttcaaggcccatacgacggcggtcaaccacaacaacctaatattgctgctagtgctgctgctgccgccaccgcaacatcctca

SEQ ID NO: 216 - DNA, 582 bp, synthetic construct
  misc_feature 1..582: note = Description of Artificial Sequence: Synthetic polynucleotide
  source 1..582: mol_type = other DNA
ggttccttgggttaccagttagcattgcaaacagctaactcattgggaatccaaaatgctgcttcactggcctctgctgtggctcaagccgtgagcgccgtaggtgtcagggcaagctcatatgcctatgcaagcgccatttccaacaccgttggtcaattcttaaccagccaaggattgctttcgcaatcgaacgcatctgccttggcatccagttttgcctccgcctttgctgcatctgccgcttcagcaagcgcctctgccagtagttcttcttacgcccaatcatcggccgccgctcaatcgcagtctgcagcgagtgctttcacccgcgcagcatctgcagctgcaagccaagctagttctcagtctgcatcacaagccggttcgtatggaagaacaactacaacttctacttcgcaaagtggagcacaagcaggatcacaggccgcttcacaagcttcctctagtagctgggctgctgcttcggcctcagcgttcgcccagtcatctgcatcgtcgctcgcctcatcctcagccttctcctctgctttctcatctgcaagttcagcttctgcagta

SEQ ID NO: 217 - DNA, 582 bp, synthetic construct
  misc_feature 1..582: note = Description of Artificial Sequence: Synthetic polynucleotide
  source 1..582: mol_type = other DNA
ggttcgttgtgttaccaactcgcgctgcagacagccaactctcttggtatacagaatgcagcctcgctagctagtgctgtctcacaggctgtttcagccgtcggcgttagagcttctagttatgcttatgcgagtgctattagtaatactgttggtcagtttttgatcagtcaaggtttattgagccagtctaatgctagtgcgttagcaagctcttttgcctctgcttttgcagctagcgcagcgtcggcctccgcttcagcctcgagttcatcctatgctcaatcctctgctgccgcacaatcccaaagtgcggcctcagccttcagcagagctgctagtgcagccgcgtctcaagctagtagccaatccgcctctcaagctggaagttatggacgcactactaccacttctacctccgaatctggcgcccaagccgcttctcaagctgcgagccaagcttcctcttcttcatgggcggccgcaagtgccagtgcctttgctcaatcttcagcttcctctctagcgtctagtagcgcgttcgcttcagcattttcttctgcaagttcaacgtctgcagta

SEQ ID NO: 218 - DNA, 546 bp, synthetic construct
  misc_feature 1..546: note = Description of Artificial Sequence: Synthetic polynucleotide
  source 1..546: mol_type = other DNA
ggtaacgtgggctatcaattaggacttaaggtagcaaactcactgggccttggaaatgctcaggccctggcatccagtctctcacaagctgtttccgctgtgggtgtcggtgcatcttcgaatgcttatgctaatgcagtcagtaacgccgttggtcaagtcctggctggtcagggaatcttgaacgcagcaaatgccggaagcttggcttcatcgtttgcctcagctttgtctagttctgctgcttctgtcgcaagccaatctgcttcgcaatctcaagctgcaagtcaatcccaagctgcagctagtgcattcagacaggccgcatcacaatccgcctctcaatcggcaagtagagctggaagtcagtcatctacaaagactacttctacgtccacctcaggttcacaagcagatagccgatcggcatcttcttcagcatcacaagcttcagcctctgccttcgctcagcagtctagcgctagcctgtctagctcctcctcatttagttcggctttctcctcagcaacatcaatatccgcagta

SEQ ID NO: 219 - DNA, 546 bp, synthetic construct
  misc_feature 1..546: note = Description of Artificial Sequence: Synthetic polynucleotide
  source 1..546: mol_type = other DNA
ggtaatgttggttaccagttgggacttaaagttgctaattcgcttggtttgggaaacgctcaggctttagcttctagtttgagtcaagcagtttccgctgtgggagttggagcttcttcaaatgcttacgctaatgcagttagtaatgctgttggacaagtactggccggccaaggaattttgaacgctgcaaatgccggttctttggcctctagctttgctagcgctctctcttccagcgcagcttccgtcgcaagccaatctgccagccaatctcaggcggctagtcagagtcaggctgccgcttccgcttttagacaggctgcttctcaatctgcatctcaatccgactccagagctggatcacaaagtagcactaaaactacatcgactagtacgtctggctctcaggcagattcaagatcagcttcatcctcagccagccaagcgtcggcctcagccttcgcccaacagagtagcgcgagtctatctagttcttcctcattttcttcagctttcagttctgctacttcgatatccgctgta

SEQ ID NO: 220 - DNA, 546 bp, synthetic construct
  misc_feature 1..546: note = Description of Artificial Sequence: Synthetic polynucleotide
  source 1..546: mol_type = other DNA
ggtaacgtcggttaccaacttggtcttaaggtggctaactcactaggacttggaaatgctcaagcattggctagctctctgtctcaagccgttagtgctgttggagtgggcgcttccagtaatgcttacgctaacgctgtgtcaaatgcagttggtcaagtcctagcaggtcaaggaattctaaacgccgctaatgccggctctctcgcttcttctttcgctagcgctttgagttcaagtgctgcttccgttgcttcacaatcggcctctcaatcacaagcggcttcgcaatctcaagcggctgcctctgcattcagacaggcggcaagtcaatctgcttcccagtcggcctcccgtgcaggttctcaatcatccacaaagactaccagcacgtccactagtggtagccaagccgattcccgctctgcttcaagtagtgctagtcaggccagcgcgtcagccttcgctcaacaatctagtgcatctctaagttcgtcatcgtctttctctagcgcattcagcagcgctacatctataagtgcagta

SEQ ID NO: 221 - DNA, 528 bp, synthetic construct
  misc_feature 1..528: note = Description of Artificial Sequence: Synthetic polynucleotide
  source 1..528: mol_type = other DNA
ggttcacaagccgcctctcagtcggcaagctcttctgcatcccaagcttcggcctcttcttttgctcaggcatcatccgcatctttggcagcctcttcctctttttcatcagccttttcctcagcaacttctctcagtgctcttggcaatgttgcttaccagttgggttttaacgtaggaacaaacttaggcttaacgaatgctgctggcttggctgcagccatctcacaggcagcatcctctgtaggtgtgggagcctcatctggtgcctatgctaatgctttgtcaaatgccgccgcccaatttttgagtgctcaaggtattttaaacacggtcaatgctggatcattagctagcagttttgcatcagcattgtcgtcagtagctgcctctgctgcagctcaagcaagttcacaaagccaagctgcaagtagtgcattttctagagctgcgagccagtcagcatcccagtcagccgcaagatcaggtgctcagagtagctcctctactaccacaacctctacatca

SEQ ID NO: 222 - DNA, 528 bp, synthetic construct
  misc_feature 1..528: note = Description of Artificial Sequence: Synthetic polynucleotide
  source 1..528: mol_type = other DNA
ggttcacaagctgcaagtcagtccgctagtagctcggctagtcaggcttctgctagctcttttgcacaggcttcctccgcttcccttgcagccagttcatcttttagtagtgctttttcaagtgcaacatccttaagtgccttgggcaatgttgcttatcaactgggtttcgacgtcggtacaaacctaggtttgacaaatgcagccggtctagctgctgccttctctcaagctgcctcctcagtaggtgttggtggttcatctggagcttatgccaacgctttgtcgaatgccgcggcacaatttttgtcggctcaaggtatcttaaacacggtcaatgctggttctttagcctcttcttttgcatccgctctttcgtcagtcgcagcatctgctgctgcccaggccagttcacaatctcaagcagcttccagcgcgttctcacgagcagcaagtcaatcagcttcacagagtgctgccaggtctggagctcaatcttccagtagtacaacaactacttcctcctca

SEQ ID NO: 223 - DNA, 540 bp, synthetic construct
  misc_feature 1..540: note = Description of Artificial Sequence: Synthetic polynucleotide
  source 1..540: mol_type = other DNA
ggtaatgttgcctatcagcttggatttaatgttgccaacaccttgggattaggtaacgctgcaggattaggtgccgcattgtcacaggctgtatcttcggtgggtgtaggagcctcttcaggtacttatgccaatgctgtttcaaatgctgtgggacaatttctcgccggtcaaggcattttgaacgctgcaaacgctgcgagccttgccagttcttttgctagtgctctaagtgcttcagccgcttctgttgctagctcgagcgcagctcaatcagcgagtcaatcccaagccgctgcatcggccttctccagagcagcatctcaatcggcttctcagtcggcagccctttctggtgcacagagctcatcgacaacaacgacaacatctacaagtggctcgcaggccgcctcacagagcgcatcatctagtgcaagtcaagcgtccgcttcgtccttcgcacaagctagttcggcttcactcgcagcttcgtcatccttttccagtgctttctcgtctgctaacaccttgtctgcatta

SEQ ID NO: 224 - DNA, 540 bp, synthetic construct
  misc_feature 1..540: note = Description of Artificial Sequence: Synthetic polynucleotide
  source 1..540: mol_type = other DNA
ggtaacgtcgcctatcaattgggtttcaacgttgcaaatacattgggacttggaaacaccgcaggcctgggtgctgctctgtcacaagcagttagtagtgtcggtgtcggagccagttccgctacctacgcgaacgcagtttctaatgccgttggtcagtttttggctggtcagggtatcctaaatggcgctaatgctgcatcattggctagtagctttgccagcgccttgtctgctagcgcagcttctgtagcttcgtcgtctgccgcccaatctgcaacccaaagtcaagctgccgcttcggccttttccagagctgcttcacaatccgcttctcaatccgcagcaaggagcggcgctcaaagtagttccactacaaccactagctcaaccagcggatctcaggcagcttcacagtccgcatcgagttctgctagtcaggcttccgcttcgtctttcgctcaggctagtagtgctagtctggctgcgtcaagttccttttcttctgctttcagttcggccaatacactgagcgcacta

SEQ ID NO: 225 - DNA, 540 bp, synthetic construct
  misc_feature 1..540: note = Description of Artificial Sequence: Synthetic polynucleotide
  source 1..540: mol_type = other DNA
ggtaacgtggcttatcaacttggtttcaacgtcgcaaacacacttggacttggaaatgctagcggattgggtgcagctttgagccaagccgtttctagtgttggtgtgggtgcatcttctggtacttatgcgaatgctgtttcaaatgctgtgggccagttcctggcaggccagggtattttgaatggtgctaatgctgcttctttggcttcttcattcgcttcagcattgagtgcttcagccgctagtgtagcttcatcatctgctgcgcaatcagcatcacagtctcaagctgccgcatcagcattttccagggctgcatctcaatctgcatcccagtcggcagccaggagcggtgctcaatccagcagtacgaccacaacttcttccacgagtggtagtcaagccgcttcccaatccgcatcatcctcggctagccaggccagtgcttcctcctttgctcaagcctcctctgcctccttagccgcttcaagtagtttttcgagtgtgttttccagtgcaaacacgttgagcgctcta

SEQ ID NO: 226 - DNA, 540 bp, synthetic construct
  misc_feature 1..540: note = Description of Artificial Sequence: Synthetic polynucleotide
  source 1..540: mol_type = other DNA
ggttcattagcatcttcattcgctagcgcattatcggcatccgcagcatccgtcgcaagttctgcagcagctcaggctgcaagtcagtctcaagccgcagcctctgcattctctagggctgcctcccaatcagcttctcagtctgcagcaagatctggcgctcaatcatcctcgaccactaccacaaccagtaccgctggatctcaagctgcttctcaatttgcatcctccgctgcatcacaagcctcagcatcgtctttcgcacgagcttcctccgcctcattagcagcaagcagcagcttttcgagcgctttcagctccgcaaattccctatcagctttgggaaacgtaggttatcagctgggctttaacgtcgctaacaatcttggtataggaaatgcagctggtcttggaaacgcactgtcacaagccgtgagtagtgtcggcgtcggagcgtccagttcctcatacgccaatgctgtcagtaatgctgttggtcagttgttagccggacagggcattctaaatgccgctaacgca

SEQ ID NO: 227 - DNA, 540 bp, synthetic construct
  misc_feature 1..540: note = Description of Artificial Sequence: Synthetic polynucleotide
  source 1..540: mol_type = other DNA
ggttcattggcatcttcattcgcttccgccttatctgcttctgcagcctcggttgcaagttcagccgccgcccaagccgcatcacagagtcaggccgcagcatcagctttcagcagggctgctagtcaatctgccagtcaaagcgcagccagatctggcgcacaatcaatttccacgacaaccactacatcaactgccggcagtcaagcagccagtcagtctgcatcatcagcagcttcccaagctagtgcctcatcattcgcgcgagcatctagcgcatcactagctgcatcgtcatcattctctagtgccttcagtagcgctaactctctatcagctctgggtaatgtaggctatcagttgggattcaatgttgccaacaatcttggtatcggtaatgcagcaggtctaggaaacgcattatctcaggccgtcagcagtgttggagtaggtgcctcttcttctacgtatgcaaatgctgttagcaatgctgttggacaattcttggcaggacaaggcattttgaacgcagctaatgca

SEQ ID NO: 228 - DNA, 540 bp, synthetic construct
  misc_feature 1..540: note = Description of Artificial Sequence: Synthetic polynucleotide
  source 1..540: mol_type = other DNA
ggtagtctggctagctcctttgctagtgctttatctgcgtcggccgcatcagtggcctcatccgcagcagcacaggctgcttctcaaagtcaggccgcggcatccgcattttcacgtgctgcgtctcaatctgcatcacagtccgcagcaaggtcgggagcacaaagtagttcaacaactaccacaacttctaccgctggttcgcaggccgcatcccaattcgcatcttcagctgctagccaagcctctgctagttcattcgcgagggcatcatcggcctcactggctgcatcatcttcgttctcttctgcattttcttccgcaaattcactgtcggctctgggtaacgtcggttaccaattgggcttcaatgtagctaataacttgggaatctcaaatgccgcaggattgggtaacgctttatcacaggccgtttcttccgtcggagtaggcgctagttcttcctcttatgccaacgcagtttccaatgcagtgggtcagtttttggctggacaaggtatcttaaacgcagctaacgca

SEQ ID NO: 229 - DNA, 540 bp, synthetic construct
  misc_feature 1..540: note = Description of Artificial Sequence: Synthetic polynucleotide
  source 1..540: mol_type = other DNA
ggttccctagcatcatcttttgcttctgccctgtctgcttctgctgcttcagttgcttcatctgcggccgcacaagcggccagccaaagccaggcagctgctagtgctttttctagagctgcttcacaatccgcttctcagtctgccgcgagatcaggcgcccaatccttttcaacaactacaacgacttcaaccgctggatcacaagcagcttctcaatcggccagtagcgcagctagtcaagcctctgcatcctcctttgctagagcatcgagtgcttcattggctgcatcaagcgcattctcttcggcattctcgtccgctaattctttaagtgccttgggaaatgtggcataccagctaggtttcaatgttgccaatacactgggaatcggaaatgccgcaggtcttggcaatgctctgagccaagctgtttccagtgtaggcgttggcgcatcttccagcacctacgctaatgctgtctccaacgctgtgggccaattcttagccggccaaggagtactgaacgcgggtaacgca

SEQ ID NO: 230 - DNA, 540 bp, synthetic construct
  misc_feature 1..540: note = Description of Artificial Sequence: Synthetic polynucleotide
  source 1..540: mol_type = other DNA
ggtaacgttggttatcaattaggtttcaatgtggccaatacgctcggaattggaaacgctccaggattaggtaacgctttgtctcaagcagcctcctctgtaggtgttggagctagttccagtgcttacgctaacgctgtatctaatgctgtgggccaattccttgcgggtcaaggagttttaaatgcaggaaacgcaggtagtctggcttcttcatttgctaacgctctaagcgcttccgcggcaagtgtcgcatcaagcgcagcagcccaaagtgcatttcaaagtcaagctgccgcaagcgctttttctcgagctgcttcacaaagtgcttctcgtggtgcggctcgttctggagctcaatcttcttcaactacaacaactaccagtacgtcaggttcacaggccgcttcacaatctgcatcctcagctgccgcccaagctagtgcatcctccttcgctcaagcctcgtctgcttccttggcagccagttcagcattctcctctgcatttagttctgcaaatagtctgagtgctcta

SEQ ID NO: 231 - DNA, 540 bp, synthetic construct
  misc_feature 1..540: note = Description of Artificial Sequence: Synthetic polynucleotide
  source 1..540: mol_type = other DNA
ggtaatgttggttatcagttgggcttcaatgtcgctaacacgctcggaataggtaacgcaccaggacttggaaacgccttatcccaagcggtatctagtgtaggtgttggtgctagtagttccgcctatgctaatgctgttagtaatgccgtgggacagtttttggccggacaaggagttttgaatatcggtaatgctggttcgttggcctcttcattcgccaatgctctgtctgcaagcgctgcttccgttgcaagctcagctgcagcccagtcagcctctcagagccaggcagctgcaagtgcattctccagagccgcatcacaatctgcttcgcgaggagcagcacgttcgggagctcaaagcagttccacaactacaacaacttctacatccggttcgcaagctgcttcccaaagcgcatcaagtgctgccgcccaggcctccgcgtccagttttgctcaagccagctcggcttcactcgctgcctctagcgctttttcctctgcctttagcagcgcaaactcactcagtgcgtta

SEQ ID NO: 232 - DNA, 540 bp, synthetic construct
  misc_feature 1..540: note = Description of Artificial Sequence: Synthetic polynucleotide
  source 1..540: mol_type = other DNA
ggtaacgtcggataccaactaggtttcaatgtggctaataccttaggaatcggaaacgccccaggattgggaaacgctttgagtcaggctgtttcatctgttggagttggtgcatcatcatctgcctatgctaacgcagtcagcaatgctgtaggacagtttttagctggccagggagttcttaatattggaaacgcaggtagtctggcatcatcgtttgccaatgccttgtctgcatctgccgcctctgtggcttcttccgctgccgcacaaagcgcttcacaatcccaagccgccgcgtcggccttctcaagagccgccagtcaatccgcttctagaggtgctgcaagatcaggtgcccaatcttcgtcaactactactaccacttccactagtggatcacaggcagctagtcaatcagcatcgtcggctgctgcacaagccagcgcttcgtctttcgcccaagctagctccgcttctctcgcagcctcatccgctttttcgtctgcattctcttcagcaaattctttgtcggcacta

SEQ ID NO: 233 - DNA, 540 bp, synthetic construct
  misc_feature 1..540: note = Description of Artificial Sequence: Synthetic polynucleotide
  source 1..540: mol_type = other DNA
ggtaatgtcggctaccagttaggattcaatgttgctaacacattgggtatcggaaacgcacctggtttaggaaatgcattatctcaagcagtttcgagtgttggagtgggagctagctcaagagcttacgctaatgcagtttctaacgcagtgggacaattccttgctggacagggagtcttgaatgtcggcaacgctggctccttggcttcatcgtttgcaaatgctctttcggccagtgcagcttctgtggccagtagcgctgctgctcaatcggcttctcaatcacaggcagccgcctcagctttctcgagagctgcttcccaatcagcttccagaggagctgctagaagtggtgcacagtctagttcaacaactactacaacgagtacatctggctcacaagccgcctctcagtccgcttcctccgctgccgctcaggctagtgcttcatcatttgcacaggcgtcctctgcttctctggctgcgtcctcagccttctcatccgctttttcatccgcaaattctttgtcagcttta

SEQ ID NO: 234 - DNA, 540 bp, synthetic construct
  misc_feature 1..540: note = Description of Artificial Sequence: Synthetic polynucleotide
  source 1..540: mol_type = other DNA
ggtaacgtgggctatcagcttggttttaacgtcgctaacacattaggaataggtaacgcgccaagtttgggaaacgcactgtcacaagctgtctcttctgtaggagttggagcttcctcttcagcatacgctaacgcagtttccaacgctgtcggtcagtttctagctggtcaaggtgttttgaatgctggaaatgctggttctttggcctctagttttgctaatgcactgtcggcttcagccgcctctgttgcatccagcgctgctgcccagtcggcatttcagtcccaagccgccgcctcggctttttccagagcagcaagtcagtccgccagtcaatccgccgctcgttctggagctcaaagttcttcaacgaccacgactaccagtacatccggatcccaagcagcttctcaatctgcaagttcggctgccgcacaagctagtgccagcagtttcgcacaagcatcgtctgcctctctagcagcgagctcagcattctcctccgcttttagttcggcaaacagtttaagtgcatta

SEQ ID NO: 235 - DNA, 540 bp, synthetic construct
  misc_feature 1..540: note = Description of Artificial Sequence: Synthetic polynucleotide
  source 1..540: mol_type = other DNA
ggtaatgtgggttatcagctaggttttaatgttgctaacacattaggtattggaaacgcaccaggacttggtaatgctttgtcacaagcagtatcttccgttggagtaggtgcatcttcatctgcttatgctaacgctgtgagtaatgctgtaggtcagttcttggccggacaaggtgtattgaatattggtaacgcaggttcgttagcctcatcctttgcgaatgctttatcagcttctgccgcatctgttgcttctagcgcagcagcacaatctgcctcccaatcccaggctgcagcttcggcattttcaagagcagcctcccagagtgcttctcgaggtgctgctagatccggagcccaatcttctagcacgactactaccacaagtacttcaggaagccaagcagcctcacaaagtgcctcgagcgccgccgctcaagcatctgcatcttcctttgctcaagcttcgtcagcctcactagctgcttcatccgcattctcatctgccttcagttcagccaatagtttgagcgctcta

SEQ ID NO: 236 - DNA, 540 bp, synthetic construct
  misc_feature 1..540: note = Description of Artificial Sequence: Synthetic polynucleotide
  source 1..540: mol_type = other DNA
ggtaacgttggttaccagttgggattcaatgttgctaacactttgggtatcggaaacgctccaggactaggaaacgctttgtcacaggccgtctcttcagtaggagtcggtgcgtcctcatctgcttacgcaaatgcagtctcaaacgcagtcggacaattcttggctggtcaaggagttcttaacgccggtaatgcaggaagtctcgccagttctttcgccaatgccttatcagctagtgctgcaagcgtcgcaagtagcgcagctgcccaatcggctttccaatcacaagccgcggcaagtgcattctctagagcggcctcacagtcagccagtcagtctgctgctcgctcgggtgctcaatcttcttctactactacaaccacgtctacttccggtagtcaagcggccagccagtctgcttcgtctgcagctgctcaggcgagtgctagtagttttgcccaagcgagtagcgcttcgttagccgcatcttctgcctttagcagtgctttctcctcagcgaactccctttcagctcta

SEQ ID NO: 237 - DNA, 540 bp, synthetic construct
  misc_feature 1..540: note = Description of Artificial Sequence: Synthetic polynucleotide
  source 1..540: mol_type = other DNA
ggtaacgttggttatcaattgggttttaatgtggcaaacacactcggcataggaaacgctccaggtttgggaaatgcattatctcaggccgtatcttccgttggtgtgggtgcatcctccagtgcatacgctaatgctgtctctaacgcagtaggtcagttcctggctggtcagggtgtcttaaacattggtaatgcaggttcattggcttcctcgttcgccaacgccttgtcagctagcgccgctagtgtcgcgtccagtgctgctgcccaaagcgcatcacaatcacaggcggctgcatccgctttctcaagggcagcttctcagtctgcatctagaggtgctgcacgttctggtgcacaatcctcttccacaacaacaactactagtacatccggatcccaagctgcttcacaatccgcatcttcagccgccgcccaagcatcagcttcttcctttgcccaagctagtagcgcttctttagctgcgtcgtctgcttttagttcggctttcagcagtgcgaattctttatctgcacta

SEQ ID NO: 238 - DNA, 540 bp, synthetic construct
  misc_feature 1..540: note = Description of Artificial Sequence: Synthetic polynucleotide
  source 1..540: mol_type = other DNA
ggtaatgtaggataccaattaggtttcaacgtcgctaatacgctaggtattggtaacgctccaggcttgggaaacgccctgtcccaagccgtttcttcggtaggagtaggagcctcatctagagcatacgcaaacgccgtaagtaatgcagttggtcagttcttggccggtcaaggtgttctgaatgccggaaacgcaggaagtctcgcttcgagtttcgccaatgctttgtctgcctctgctgcctctgttgcgagttcagctgcagcccagtctgccagccaatctcaagctgcagcttccgcctttagcagagctgcatcacagtcagcatcccaatccgcagccagatcaggtgctcaaagctccagtaccactacgactacttcagcctccggatctcaagccgcatctcagagcgccagtagcgctgccgcgcaagctagcgcctcttcatttgctcaggcctcaagtgcctcccttgccgctagctcggccttttcttctgctttttcaagtgctaactcgctgtctgcgtta

SEQ ID NO: 239 - DNA, 540 bp, synthetic construct
  misc_feature 1..540: note = Description of Artificial Sequence: Synthetic polynucleotide
  source 1..540: mol_type = other DNA
ggtaacgttggttaccaattgggtttcaacgttgctaacaccctgggtataggaaacgctcctggtcttggtaatgctctctcccaagctgtatcgtcggtcggagtaggagcttcatcaagtgcctatgcaaatgcagtctcaaatgctgtcggacaattcttggcaggtcagggcgttcttaatgcaggtaatgccggatcgttggccagcagcttcgctaacgctctttccgcttcggccgcttctgtggcatcctctgccgctgcacaaagtgcctttcaatcacaagcggccgctagtgcatttagtcgagctgcttctcagagtgcgagtcagtcagctgcaagaagtggtgctcagtcatcttctactactacaactacgtctacttcaggctctcaagctgcctctcagtccgcatcgtctgctgccgctcaagcatcagcgagtagctttgcgcaagcatcatccgcgtcacttgctgcctcaagtgcttttagtagtgccttctcttccgctaattcattgtccgcctta

SEQ ID NO: 240 - DNA, 540 bp, synthetic construct
  misc_feature 1..540: note = Description of Artificial Sequence: Synthetic polynucleotide
  source 1..540: mol_type = other DNA
ggtagtcttgctagctcttttgcatccgctctttcagcttcagctgcatcagtggcaagttctgccgctgctcagagtgcttctcaaagtcaagctgccgcttcagccttcagcagggctgcttcacaatcagcctcacaaagcgcagcaagatcaggtgcccaatctagtagtaccaccacgactacatctgcttccggttcacaagcagcttcgcagtctgcttccagtgccgcaagtcaagcaagtgcctcgtcattcgctcaagcgagctctgcttcgttagctgcttcatctagcttttctagcgctttttcatcagctaattcgttgtccgctctgggaaatgttgcttaccagctgggatttaatgttgctaacacacttggaattggaaatgctccgggactgggcgcagccttatctcaagcggtttccagcgttggtgtgggtgctagtagcagtacctatgcaaacgtggtcagcaatgctgttggtcaattccttgctggacagggagttctgaacgctgctaatgca

SEQ ID NO: 241 - DNA, 540 bp, synthetic construct
  misc_feature 1..540: note = Description of Artificial Sequence: Synthetic polynucleotide
  source 1..540: mol_type = other DNA
ggtagcttggcaagctctttcgcctcagctctgtccgcatccgctgcttcagtcgctagctcagcagctgcacagagtgcttctcaaagtcaagctgcagcctctgccttcagtagagccgcttcgcagagtgcatctcagagtgccgcgaggtctggagcacaatcttccagtactacaacaactacgtctgcttccggatcacaagccgcctcgcaatccgcctccagtgctgcgtcacaagcttcagcttcttcatttgcacaggcctcctctgcatctctcgcagcttcctcttcgttctcttcagcattttcttcggctaacagtttgtctgctcttggtaacgtcgcatatcaactcggtttcaacgttgctaacaccctaggtattggtaatgcaccaggactcggtgccgccctttcacaggcagtgagctctgtcggcgtcggtgcatcatcaagtacttacgccaatgtcgtgtctaatgctgtgggacagtttttagcaggacaaggtgtcctgaatgctgcaaatgca

SEQ ID NO: 242 - DNA, 540 bp, synthetic construct
  misc_feature 1..540: note = Description of Artificial Sequence: Synthetic polynucleotide
  source 1..540: mol_type = other DNA
ggttctcttgcttcgagctttgctagtgcattgtccgctagcgctgcatccgtcgcttcttctgctgcagcacaatctgcatcacaaagccaagctgctgcttctgctttttctagggctgcttctcaatcggctagtcagtcagctgctagaagtggagctcaatcttcgtctaccacgactactacctcagcatccggtagtcaagcggcctcacagtccgcatcatcagccgcttcccaagcttccgcatcgtcattcgcccaggcctcgagcgcctctttggccgctagcagttcgttttcttccgcattctcctccgcaaactctctaagtgctcttggaaatgttgcataccaattgggatttaatgttgctaacactttgggaattggcaatgcgccaggattgggagctgcattatctcaagcagtgtccagtgtcggtgtgggagcttcatcaagcacttatgctaacgtggtttctaacgcggtaggccaatttctcgcaggtcaaggtgttttgaatgctgctaatgca

SEQ ID NO: 243 - DNA, 540 bp, synthetic construct
  misc_feature 1..540: note = Description of Artificial Sequence: Synthetic polynucleotide
  source 1..540: mol_type = other DNA
ggttctctggcctcgagctttgcctccgcattaagcgcttccgcggcttcagtggcttctagtgccgccgcccagagcgcttcccagagccaggccgctgccagtgctttttcgagagctgctagccaatcagcatcacagtccgcagcgagatccggtgcacaatcttctagtactactaccactacctctgcaagtggatctcaagccgcttcccaatcggcctcttctgctgccagtcaagcatcagcgtcgtcttttgcccaagcttcctctgctagtttagcagcctcgagcagcttctccagcgcattttcttctgctaattcactttcagctttgggtaacgtagcctatcaattgggttttaacgttgctaacacacttggaataggtaacgcacctggtctgggtgcagccctgtctcaagctgtgagctccgtgggcgtcggtgcctcgagttcaacctatgcaaacgtagtatctaacgccgttggacaattccttgccggtcaaggagtacttaacgcagctaatgca

SEQ ID NO: 244 - DNA, 540 bp, synthetic construct
  misc_feature 1..540: note = Description of Artificial Sequence: Synthetic polynucleotide
  source 1..540: mol_type = other DNA
ggttctctagcttcttctttcgcgtccgctctcagtgcttcggccgccagtgttgcaagctcagctgccgctcagtccgcaagccagagccaggctgcggcaagtgccttttctcgagctgcttcccaatctgcaagtcagagtgctgcacgaagtggagcacaatcatcgtctactaccacaactacttctgctagtggatcccaagctgcttcacaatcggctagttcggctgcatctcaagccagtgcgtcctcattcgcacaggcctcgagcgcttcattagcggcatccagctcattctcgtctgcatttagctccgctaatagtctgtctgctcttggaaatgttgcctaccaacttggattcaacgtagccaatacactgggaataggcaacgctcctggcctcggtgctgctctgtcacaagcagtttctagcgtaggtgtaggtgcttcttccagcacctatgctaatgtggtgtcaaatgctgttggacaattcctggcaggacaaggtgtgctgaacgccgctaatgca

SEQ ID NO: 245 - DNA, 540 bp, synthetic construct
  misc_feature 1..540: note = Description of Artificial Sequence: Synthetic polynucleotide
  source 1..540: mol_type = other DNA
ggtagcctcgcatcttcctttgctagcgctctgagtgcctcggctgcaagtgttgcatcaagtgcagccgcacagtctgcttcgcaaagccaagctgcggcctctgcattttccagagcagcatcacaatccgctagccaaagcgctgctaggtccggtgcacaatcatcttcaactactaccaccacttcagcttccggctctcaagctgcatcacagagcgccagttccgccgcctcgcaggcttccgcatcatctttcgctcaagcctcgtccgcttccctagccgctagctcatccttctcaagtgctttttcctccgccaattctctttcagctttaggaaacgttgcttaccaattgggttttaacgtagccaacacacttggcatcggaaacgcacctggtttgggtgctgctttaagtcaagccgtttccagtgtcggtgtgggagctagttcgagcacgtatgctaatgtggtttcgaacgccgtcggacaatttttagcgggacaaggtgttttgaatgcagctaacgca

SEQ ID NO: 246 - DNA, 540 bp, synthetic construct
  misc_feature 1..540: note = Description of Artificial Sequence: Synthetic polynucleotide
  source 1..540: mol_type = other DNA
ggttcattagcatctagctttgcatctgcactctccgcttcagctgcctcggtggcctcgtccgctgcagcccagtcagctagtcaaagtcaggctgcagcttctgccttttctagggctgcatctcagtcgggtagccagagtgccgctcgatctggtgctcaaagctcgagtactaccacaacaacaagtgctagtggatctcaggccgcgagtcaatcagcatcgtctgccgcttcacaagcttcggcttcttcttttgcgcaagctagctcggcttccttggctgcttccagctccttcagctccgcattttcaagcgctaatagtctctcggctttaggaaatgttgcctatcaactcggtttcaatgtggctaacactttgggtataggtaatgctccgggattgggagcagctttatcgcaggccgtctcttctgtaggagtaggcgcttctagctctacatacgctaacgttgtcagtaacgcagttggtcagtttttggctggacagggagtgttaaatgctgctaatgca

SEQ ID NO: 247 - DNA, 540 bp, synthetic construct
  misc_feature 1..540: note = Description of Artificial Sequence: Synthetic polynucleotide
  source 1..540: mol_type = other DNA
ggtagtttggcttcttcatttgcttcggcattgagcgcgagtgcagcttcagtcgcttcgtcagctgccgcacaatcagcctctcagtcacaagctgctgcatccgccttttcccgagctgcttcgcaatcagcaagccaatcagcagcaaggtcaggagcgcaaagtagctctactactaccaccacatcagcatcaggttcccaggccgcaagtcaatccgcaagctccgcagctagtcaggcatcggcatcttccttcgcacaagcttcttctgcttccttggccgcctcttcatcattttccagtgcgttctccagcgccaactccctatcagctctcggtaacgttgcttatcaactgggtttcaacgtagcgaacactcttggcataggtaacgcacctggattgggagcggcattgtctcaggctgtttcttctgttggtgtaggagcatcctcctccacttatgctaatgtcgtctccaacgctgttggacagtttttagctggtcaaggagtactaaatgcagctaacgca

SEQ ID NO: 248 - DNA, 540 bp, synthetic construct
  misc_feature 1..540: note = Description of Artificial Sequence: Synthetic polynucleotide
  source 1..540: mol_type = other DNA
ggtagtttggcctctagttttgctagcgctttgtccgctagtgctgcctctgttgcatcgtcagctgcagcacaatcagcgtctcaatcccaggcagcagctagtgcattttctagagcagcctcacaaagtgcttcccaaagtgccgccaggtcgggagctcaatcatctagcaccactacaacaacttctgcttcgggatctcaggccgcatcccagtccgcttcctccgccgcatctcaagcttctgcctcttcatttgcccaggcttcatctgcatcattggctgcttcgtcctccttttcatccgccttttctagtgctaactccttgtcagcacttggaaacgttgcttaccaactaggatttaatgtagccaatacacttggcataggaaacgcccctggattaggagcggcattatcacaggctgtctctagtgttggagtgggagcttcaagctctacgtacgcaaacgttgtctccaatgccgttggacagtttttggctggtcaaggagttttaaatgcagctaacgca

SEQ ID NO: 249 - DNA, 540 bp, synthetic construct
  misc_feature 1..540: note = Description of Artificial Sequence: Synthetic polynucleotide
  source 1..540: mol_type = other DNA
ggtagtcttgcaagctcatttgccagcgcactgtctgcttctgccgcttcagttgcatcaagcgctgcagctcagagcgcatctcaaggacaagctgctgcttccgcattctctagagcagccagtcaaagcgcctcgcagtctgctgcaagatctggtgctcaatcatcaagtacgacaacaacgacttcagcgtcgggaagtcaggccgcttctcaatctgcttccagtgctgcctcacaagcctcagcttcgagcttcgcccaagccagttccgcctccctggcagcttcttctagcttttccagcgctttctcttcagctaattctctaagtgcgctgggaaatgttgcttaccaattgggtttcaacgtagccaacacactaggtatcggaaacgcaccaggtctaggtgcagctttatcccaagcagtttcaagtgttggtgtcggtgcttcttcctcaacctatgccaacgtagtctcaaatgccgttggtcaatttctggccggacagggcgtgctgaatgccgcaaatgca

SEQ ID NO: 250 - DNA, 579 bp, synthetic construct
  misc_feature 1..579: note = Description of Artificial Sequence: Synthetic polynucleotide
  source 1..579: mol_type = other DNA
ggttcggcgacaagctctactaccacgactactaccgtttccaaatccgctgctgctgcagctgcagcagcagctgctgcaagttcagcctcgtctgctagtagagattctgatcgatctagtaccgctgcggaggcttacgcttctagcagtgcttacgccagtagcaatttcgaaaactacttggctagcgacttgtctaattctgatgagttcgaatcggtatatggctccttatactcctccgcagacgcagcctcgtacgcaagatcttctgcagaatacgcctcgaacacgttaggtctttctaaggaaacatcgtatgccctggcatcagctgcggctaaagcagttagcgaatccggatcaggatcatccagttacgccagagcttacgccgtagctaaatcctctgctgtggtcttgcaaaactctggtgtacttagcagttctaactccagaagtttgtcgtcagcttttgccaaggctttcgcatcttcttccgcgagtagctatgcttcgtatcagtctaggaacacaggtacaagtagggcatcatctgctggttctggtgcagca

SEQ ID NO: 251 - DNA, 579 bp, synthetic construct
  misc_feature 1..579: note = Description of Artificial Sequence: Synthetic polynucleotide
  source 1..579: mol_type = other DNA
ggttccgcgacctcatccactactacaaccacaacagtttccaaaagcgctgctgccgcagcagcagctgcggctgccgcttcctccgctagttccgctagtagagactcggatagaagtagtaccgcggctgaggcgtatgcctcttcctcagcttacgcctctagcaattttgaaaattatttagcatccgatctatcgaactcagatgagtttgagtcagtgtacggatccgtctattcatcctcggacgctgcctcttatgcaagatcgtctgccggttacgccagtaacacccttggattgtccaaagaaacgagttacgctctggcctccgccgctgctaaagcggttagtgagtctggaagtggatcttcttcttatgctagagcgtacgctgttgctaaatcttccgctgctgttttgcagaactcgggagtcttgagctctagtaacagtcgtagcttgagtagtgcatttgctaaggcttttgcttcctcttcagcaagttcttatgcctcgtatcagtcacgtaatacaggaacttcacgagcgtcatccgcaggctcgggcgctgca

SEQ ID NO: 252 - DNA, 579 bp, synthetic construct
  misc_feature 1..579: note = Description of Artificial Sequence: Synthetic polynucleotide
  source 1..579: mol_type = other DNA
ggtagcgccacttcttccactacaactactacgacagtatctaaatcggctgccgcagctgctgcagctgccgctgccgcttctagcgccagcagcgcctctcgtgattcagacagatcttcgactacggccgaggcctacgcatcttcgagcgcttatgcctcaagcaattttgaaaactacctagctagcgatctttcgaattctgacgagtttgaatcggtgtacggaagcgtgtattcgtctagtgatgcagccagttatgctcgttcatccgcaggttatgcttcaaatacactcggactgtccaaggaaacttcctacgcacttgcctctgctgccgcgaaagctgtttctgaaagtggttccggaagttcttcatatgctcgcgcatatgcagtggccaaaagttccgccgtagtattgcaaaattctggtgtcctaagctctagcaattcgcgatctttatcctcagcatttgctaaggcctttgcgtcgagtagtgcctcctcctacgcgtcctacaaaagtcgtaacacaggtacgtctagggcaagcagtgctggtagtggtgctgca

SEQ ID NO: 253 - DNA, 579 bp, synthetic construct
  misc_feature 1..579: note = Description of Artificial Sequence: Synthetic polynucleotide
  source 1..579: mol_type = other DNA
ggtagcgcaaccagttccacaaccactactacaacagttagtaaaagcgctgcagctgccgctgctgcggctgctgctgccagttccgcatctagtgcttccagagactccgatagaagctctactgctgccgaagcttacgcttcttcctccgcttacgctagctcgaattttgaaaactacctggcaagtgatcttagcaattcagatgaattcgaaagtgtatacggatccttgtattcaagtagtgacgcagcttcttatgcgcgttcatccgctggttacgcctccaatacactgggactttccaaagaaacatcttacgcgttggcttctgctgccgctaaagcagtgtccgagtccggatctggtagtagttcatacgcgagggcttacgctgtggctaagtcctcagccgtagtcttgcaaaactctggtgttctatcatctagtaactctagaagcctctcatctgccttcgcaaaggctttcgcctcttcctcggcatcatcatatgcttcatataagtcaaggaatactggcacctcgcgtgctagctctgctggaagtggagctgca

SEQ ID NO: 254 - DNA, 579 bp, synthetic construct
  misc_feature 1..579: note = Description of Artificial Sequence: Synthetic polynucleotide
  source 1..579: mol_type = other DNA
ggttcagcgacttcgtctacaactacgaccaccacagtttctaaatctgcagcagcagctgccgcagctgcagctgctgctagtagcgctagctcggccagaagggattctgacagatcctcaagtacagcagaagcctacgcgtcctcatctgcttatacgtcatctaattttgagaactatctagccagtgatttgagtagctccgacgagtttgagtccgtttatggatctctctacagtagttcagatgccgcttcgtacgctcgatcgtctgctgaatatgccagtaataccctgggtctgtctaaagagacaagttatgctctcgcttctgcggccgccaaagctgtttcagaaagcggttctggctcatcgagttacgctagagcttatgccgtggccaaaagctctgccgtggtgttacaaaattcaggagttttgtcaagctcgaattcaagaagtttatcgtctgcatttgccaaggctttcgccagctcttccgcatcatcatacgcttcttacaaatctagaaataccggtacttccagagcctcctcagctggctcgggagctgca

SEQ ID NO: 255 - DNA, 579 bp, synthetic construct
  misc_feature 1..579: note = Description of Artificial Sequence: Synthetic polynucleotide
  source 1..579: mol_type = other DNA
ggtagtgctacttcgtcaacgacaacaactacaacagtttccaaatcagctgcagcggccgctgccgctgctgcggctgcttcctcagctagctctgctagcagagattcagaccgaagttctactgctgcagaggcatatgcttccagttctgcatacgcttcttcgaatttcgagaactatttggcctcggatttgtcgaactcagacgagtttgagtccgtatacggttctttgtactcctccgcagatgctgcatcttacgctagctctagttctgaatatgcatcaaataccctcggtctatctaaggaaacctcgtatgctcttgcatcagctgctgctaaggctgtgtcagaatccggaagtggctcctcttcctacgcaagagcatatgccgtggccaagagctctgccgtggttttaaggaactcaggtgttctttcctcatcaaactccagatccctttcgtccgcatttgcgaaggcattcgcttcatcctctgcatcaagttatgcatcatataaaagtagaaatacaggcacctccagggcatctagtgcgggctcaggagccgca

SEQ ID NO: 256 - DNA, 579 bp, synthetic construct
  misc_feature 1..579: note = Description of Artificial Sequence: Synthetic polynucleotide
  source 1..579: mol_type = other DNA
ggttcagcaacctcatcaactacaacaacgaccactgtgtctaagtctgctgctgcagctgctgcggcggccgcagccgctagttctgcatcgtccgctaggagagattctgatagatcttcaagcaccgccgaagcatatgctagttcctctgcttacacctcttccaattttgaaaattacctcgcttccgacttaagttcctcagatgaattcgaatccgtttatggtagtctgtattctagttctgacgctgcttcttatgctagaagctctgcggaatacgctagcaacactttgggtttatcaaaagaaacatcttacgctttggccagtgctgctgctaaggccgtctcagaaagtggatctggtagcagttcttacgccagagcctatgctgtagctaagtcatctgctgtagtcttgcagaactccggagtcttgtcgagcagtaacagtagatcattgagttcagcttttgcgaaagcttttgcatcctcttcagcttcatcctacgccagctcaaaatcaaggaacacaggaacctcccgagctagtagcgcaggttccggagctgca

SEQ ID NO: 257 - DNA, 558 bp, synthetic construct
  misc_feature 1..558: note = Description of Artificial Sequence: Synthetic polynucleotide
  source 1..558: mol_type = other DNA
ggttcttttgcctctgcctcagcatacgctttcgcatttgctagcgccttttctcaagtcttatccaattatggtttgctcaatatcaataacgcttacagcttggcctcgagtattgctaacgcggcgagcgcttcagcatcatcagctgcagctgctgcagcttcatcttcttctgctgcagcggccgctgcagccgcttctggcgctgcaggtagcgcagctgcaacttcgaccactacatcgacatcgtcatctactgcagcagctgccgcttctgccgccgcttcagctgccgcctccgccagtggagccgccagagctgccggagcctcttccgccgcgtcagacgcttccgcatcaagcagtttacagcaatccttgggttcagcattggctcagtcatcttcctttgccgcagcctttgcccaggcaaactcagcagcatccgccgccgcaattgcatacgctctagcacaaatcgttgctaaccaaataggattttcatcttactcttcagctttcgctagtgcggcttcatcagccgtttcatcacta

SEQ ID NO: 258 - DNA, 558 bp, synthetic construct
  misc_feature 1..558: note = Description of Artificial Sequence: Synthetic polynucleotide
  source 1..558: mol_type = other DNA
ggtagctttgcatcggcctcagcttatgcatttgctttcgcctcagctttttcgcaagtcttaagtaattatggattattgaacatcagtaacgcctacagtctagccagttctattgcatccgctgctagtgcatctgcaagttctgccgccgccgctgcagcgtccagctctgcagctgctgctggtgccgccgcagcttccggcgctgcaggtagtgctgcatcaacgagtactacaacttcaactagtacaagtaccgcagccgcagctgcaagcgcagcagctgcagcagctgcttctgcatcaggtgcagcccgagcagctggcgcgtcctcagctgcttccgctgcatctgcttccagcagcctgcaacaatctttgggatctgccttagcacaaagttcttccttcgcagctgcatttgcccaagccaattctgctgcttctgcggctgccatagcctacgccctggcccagactgttgcaaaccagataggtttttccagctattcgtctgcatttgctaccgccgcttcttctgctgtttcctcctta

SEQ ID NO: 259 - DNA, 558 bp, synthetic construct
  misc_feature 1..558: note = Description of Artificial Sequence: Synthetic polynucleotide
  source 1..558: mol_type = other DNA
ggttcattcgcatccgctagtgcctatgcctttgcatttgccagtgcattttctcaagtcctgtcgaactatggattattaaatatttccaacgcctacagcttggcttcttcaatcgctaatgcagcttcggcttcagccagtagcgccgctgcggccgctgcatcatcttcctctgccgcagccggagcagccgcagcttcaggagcagccggctcggttgccgctacaagtactactactacggctagtacttcaactgccgcggctgccgcttctgccgctgctgcagctgctgcttctgcttctggcgccgctagggccgctggtgctagttcagctgcaagtgccgcctcagcctccagtagtttgcagcaatcactgggaagtgccttggctcaatcctcatcattcgccgccgcattcgcgcaagccaattcagcggcatctgctgctgctatcgcttacgctttggctcaaacagtggcaaaccaaattggattcagttcatactcctccgcgtttgcatcagcagctagctccgccgtttattcatta

SEQ ID NO: 260 - DNA, 564 bp, synthetic construct
  misc_feature 1..564: note = Description of Artificial Sequence: Synthetic polynucleotide
  source 1..564: mol_type = other DNA
ggtgccagcgcatctgcctacgctagcgctatctctaatgctgttggtccttatttgtacggtctaggactctttaaccaagccaacgcagcttcctttgcttcctccttcgcaagtgcagtcagttctgccgtcgcttcagcttccgctagcgctgcttcctcagcatatgcccagtccgctgccgctgcacaagcacaggcagcttcatctgccttttcacaggctgccgctcaatcagccgcagcagccattgctggagcaagtgctggtgctggagcgtccgctggtgcaggagcttcagcaggagcaggtgctgttgcagctagtcaggcagccgcatcttcatctgcaagtgccgttgcgtcagctttcgctcagtcagcctcatacgcactagcttcaagttctgcttttgccagcgcttttgcttccgcaacatcagccggttacttgggatctttggcgtaccaattgggtttaaccaccgcatacaatttgggtttaagtaatgctcaagctttcgcaaacactctgtcccaggctatcgttggagtaggagta

SEQ ID NO: 261 - DNA, 597 bp, synthetic construct
  misc_feature 1..597: note = Description of Artificial Sequence: Synthetic polynucleotide
  source 1..597: mol_type = other DNA
ggtgcttctgccagtgcgtacgcttcggctattagcaacgccgtaggtccatatttatacggtttaggcttgttcaatcaagcaaacgctgcatctttcgcttcaagtttcgcaagtgcagtttcaagtgcagtcgctagtgcttcggcctctgccgcttcatctgcctatgcgcagtcagcagctgcccaggctcaagccgctagttctgcattctctcaggcagcagcgcagtccgccgctgcagcttctgcaggagctagtgccggagctggagcgtcagctggagctggtgcagttgccggagccggagcggttgcgggcgcaggtgccgttgcaggtgctagtgctgctgccgctagccaagccgctgcatcgtcatcagcatctgctgtggctagtgcttttgctcagtcagcttcctatgctctggcttcatcaagtgcgtttgctaatgcatttgctagcgctactagtgcgggttacttgggatccctggcctatcaattgggactgacgactgcatacaaccttggattgagcaacgctcaagccttcgcttctactctgtctcaagccgtgacaggagtgggctta

SEQ ID NO: 262 - DNA, 618 bp, synthetic construct
  misc_feature 1..618: note = Description of Artificial Sequence: Synthetic polynucleotide
  source 1..618: mol_type = other DNA
ggtgcatcagcaagtgcttacgcatccgctatctcaaatgcagttggcccttacttgtacggattaggtctgttcaaccaagctaacgctgcgtcctttgcctcttccttcgcttcggcagttagttcggcagtcgcttcggctagtgccagtgctgcatcttcggcatatgcccaatctgctgccgctgcacaagcacaggctgcgtcgagcgctttttcacaggctgctgcacaatcggcggctgcggcttctgctggtgcatcggctggtgccggagcatcagcgggtgcaggagcttcagctggagctggtgcaagtgcaggcgcaggagctagcgccggcgctggtgctattgcaggtgctggagccgcagccacgagtcttgctgcagcctcctcatctgcttccgctgtagcttctgcttttgcacaatcagcatcttctgcattggcctcttcttccgctttcgctaatgcttttgctagtgccacctctgtctccgcactgaatagtatagcttatcagatgggtgtgtccgctgcaaatattttgggaataagcaacgcacaaggatttgcaaatgctttgagccaggctgtaggtgttgttggtgta

SEQ ID NO: 263 - DNA, 552 bp, synthetic construct
  misc_feature 1..552: note = Description of Artificial Sequence: Synthetic polynucleotide
  source 1..552: mol_type = other DNA
ggtatacttactcaagaaaatgcagctggtttagcttcatccgtttcctccggtatatcaagtgcagcaagctcggtggcagctcaagcggcctcagctgcacaatcttctgcctttgctcagagccaggcggccgctcaagctttttcgcaggcagcctcaagatcagcgagccaatccgcggctcaagctggatcttcctccactagtacaacaactactacatcacaagctgcttctcaagctgcctcccaatctgcctcctcttcgtctagcgcagcttcacagagtgcttttagtcaagccagttcttcggctttagcttcgagttcaagtttctccagtgccttttcttcggcatcgtctgccagcgccgttggtcaagtaggataccagattggacttaatgcagctcaaactcttggtattagcaatgcaccagcgttggccgatgctgtttcacaggctgtcaggaccgttggagtcggtgcctcaccatttcaatacgcaaatgccgtctctaatgccttcggacagctcttgggcggacaa

SEQ ID NO: 264 - DNA, 552 bp, synthetic construct
  misc_feature 1..552: note = Description of Artificial Sequence: Synthetic polynucleotide
  source 1..552: mol_type = other DNA
ggtattttgacacaagagaatgcagccggactggcttcctccgtttctagcgctataagctccgccgcttcctcagtcgctgcccaagcagcctcagccgcacaatcttctgcttttgcacaaagtcaagctgcagcacaagctttttctcaagctgccagcagatcagcttctcagagtgctgcacaagctggaagctcaagtactagtactactaccaccacctcacaggctgcgtcgcaagctgcttcacaatcagcaagctccagctctagtgctgcctcccagagcgcattctcacaagcgagttcatctgcgttagccagtagctctagtttttcttcggctttttcttccgcctcgtccgcatccgctgttggacaggttggataccagatcggcttgaacgccgcacagacattgggaatttctaacgcaccagcccttgcagatgctgtaagtcaggctgtacgtacagtgggcgttggagcttccccattccaatacgctaacgccgtctccaacgcctttggccagttgttgggaggccaa

SEQ ID NO: 265 - DNA, 552 bp, synthetic construct
  misc_feature 1..552: note = Description of Artificial Sequence: Synthetic polynucleotide
  source 1..552: mol_type = other DNA
ggtatcttgactcaagaaaatgccgctggattagcctcttctgtgtcatcggccatttccagtgctgctagttccgttgcagcacaagctgctagtgcggcacaatcttcagctttcgctcaatcccaggcagctgcacaagcattttcccaggctgcatcgaggtctgcttcccagtctgctgcccaagcgggatcatccagcacttccacaacaaccactacatcacaggctgcaagtcaggcagcatctcaatcagcaagctcttcatacagcgcggcttcgcagtcagctttttctcaagctagctcatccgctttggcttctagttcttcgttctcctcagctttcagctctgctagtagcgcttctgccgttggtcaagttggttatcaaattggactgaatgccgctcagacattaggaatctctaatgcaccagcattcgctgatgccgtttctcaggctgttagaactgtcggagttggagctagcccattccaatatgctaatgctgtttcaaatgctttcggccaactgctaggaggccaa

SEQ ID NO: 266 - DNA, 552 bp, synthetic construct
  misc_feature 1..552: note = Description of Artificial Sequence: Synthetic polynucleotide
  source 1..552: mol_type = other DNA
ggtatcctgactcaagaaaatgctgcaggtttggcttcatccgtatcttctgctatttctagtgcagctagctcagttgcagcccaagcagcatccgcagcccaaagctcagctttcgcacagtctcaagctgctgcacaagctttttctcaagcagcctccagaagtgctagccaatctgcagctcaggctggaagttcatctactagtacgactacgacaacatctcaagccgcttcacaggctgcgagtcagtccgcttcatcttcctattccgctgctagccagtccgccttctctcaggcttcttcgtccgcattagcctcctcatcgtcattttcgtctgccttctccagtgcttcttctgccagtgcggtaggacaggtaggataccagatcggtttgaacgcagctcagaccttgggaatctctaacgcccctgcctttgccgacgcagtcagtcaggcggttagaacggtaggagtaggtgctagtccgttccagtatgctaatgctgttagtaatgctttcggtcaattgttaggaggacaa

SEQ ID NO: 267 - DNA, 552 bp, synthetic construct
  misc_feature 1..552: note = Description of Artificial Sequence: Synthetic polynucleotide
  source 1..552: mol_type = other DNA
ggtattctcacgcaagagaacgctgccggtctggcatcgagtgtcagttccgccatttcgtccgcagcatcttctgtggcggcacaggccgcttcagctgcacaatcatcagcttttgcccaaagtcaagcagccgcccaagctttatcgcaagcagcatctaggtctgcatcacagagcgcagctcaagctggctcgtcgtctacctccaccacgaccactacttctcaagccgcatcccaagccgcaagtcagagtgctagtagctcgtattcagcagcctcgcaaagtgcctttagccaagcctctagttcggccttagcatccagttcgtcgttctcaagtgcttttagtagtgccagcagtgcgtctgctgtcggacaagtaggttaccagattggcttaaatgctgctcagacactgggaatctcctccgctcctgccttcgccgacgctgttagccaggcggtcagaacagttggagtgggcgcttctccatttcaatatgcaaatgcagtctctaacgcctttggtcagttactgggaggtcaa

SEQ ID NO: 268 - DNA, 552 bp, synthetic construct
  misc_feature 1..552: note = Description of Artificial Sequence: Synthetic polynucleotide
  source 1..552: mol_type = other DNA
ggtattcttactcaggaaaacgctgccggtttggcttcttcagtttcttcggcaatttcgtctgctgcgtctagcgtagcatcccaagctgccagtgctgcacaatcaagtgcttttgcacaaagtcaagctgctgctcaggctctatcccaagcggcttctaggtcggcgtctcagagcgctgctcaagctggttcatcatctacctctaccacgacgaccacttcgcaagcagcttcccaggcagcctcacaatcagcatctagttcgtactcagctgcttctcaaagtgccttttcccaagcttcctcctccgcactagcaagttcatcaagcttcagttctgcatttagtagtgcctcttcagctagtgctgtgggtcaggtaggataccaaatcggtctaaacgccgcacagacacttggtatctccaatgctccagcctttgctgatgctgtgtcccaagcagtacgaactgttggcgttggcgcctcgccattccaatatgctaacgcagtgtctaatgccttcggtcaattgttgggagagcaa

SEQ ID NO: 269 - DNA, 513 bp, synthetic construct
  misc_feature 1..513: note = Description of Artificial Sequence: Synthetic polynucleotide
  source 1..513: mol_type = other DNA
ggtgttttgaatgctggtaacgcttcggctcttgctggttcttttgcaagagccttgtctgcaagcgctgaatcacagagttttgctcaatcacaagcttatcagcaggccagtgcttttcagcaagctgctgctcagtccgcagcacagtcagcttctagagctggcagcacctcaagttctacgacaacaactacttcgggagctacatctcaagcagcttctcaaagcgcatcttctagttattcgagtgcctttgcacaagccgcttcttcctccctcgcaacctcttccgccatttccagagcatttgcctcagttagttcagcctctgccgcaagtagtctagcttacaacataggactatcagctgctcgcagtttgggaattgcatccgataccgccctggctggtgcattggcccaggccgtaggaggtgttggtgcaggtgcttcagcgtcagcgtatgcaaacgctatagctagagccgctggacaattcttggcaacacaa

SEQ ID NO: 270 - DNA, 513 bp, synthetic construct
  misc_feature 1..513: note = Description of Artificial Sequence: Synthetic polynucleotide
  source 1..513: mol_type = other DNA
ggtattgcttccgatacagccttagctggagcattagctcaggcggttgccggtgttggtgctggagcttcggctagcacatacgccaacgtcatagccagagccgcaggacaattcttggcaacacagggcgttttagatgctggcaatgcaagcgctcttgctggttctttcgccagagcgctgagtgctagtgctgagagtcagagctttgcccaaagccaagcttttcaacaagcttcggccttccaacaagccgcaagtcaatcggctggtcaatctgcttcacgtgctggttcaacatcgagttcaaccaccactacgaccagcgcagcagcctcgcaggctgcatcccaatctgctagctcatcatcttcttctgcatttgctcaagccgcttcgagttctctggctacttcctcagcaatctctagagctttcgcgtccgtgtcatctgcgtctgcagcatcgagtttggcttataccatcggacttagtgctgctcgatcttta

SEQ ID NO: 271 - DNA, 513 bp, synthetic construct
  misc_feature 1..513: note = Description of Artificial Sequence: Synthetic polynucleotide
  source 1..513: mol_type = other DNA
ggtattgcttccgataccgcattagcaggagccttggcacaggctgttgctggtgttggtgcaggtgcatctgcgtctacatatgcgaatgtcattgcacgtgctgctggtcaatttcttgctactcaaggtgtcttggatgcaggtaatgcttccgcattggccggatcgttcgccagagctctttctgcttcggctgaatcacaatctttcgcccaatcacaagcctttcagcaggctagcgcttttcaacaggccgcttctcaaagtgcaggacagtcagcttcccgtgctggttccaccagttcttcgacaacaactacaaccagcgccgctgccagtcaagctgcatcacaatcagctagttcatcaagcagtagtgctttcgcacaagcagcaagttcctccttggcaacttcttctgccatttcaagagcttttgcttcagttagtagcgcttctgcggcatcgtcgcttgcatatacgattggcctgtccgccgctagaagtcta

SEQ ID NO: 272 - DNA, 513 bp, synthetic construct
  misc_feature 1..513: note = Description of Artificial Sequence: Synthetic polynucleotide
  source 1..513: mol_type = other DNA
ggtatagcctccgatacggcactagctggcgcacttgcccaggcagttgctggagtaggtgctggtgcttcggctagtacttacgctaacgttatagctcgtgcagctggtcagtttttggcaacccaaggagtgctggatgcaggcaatgcaagtgcattggctggtagcttcgcccgagctcttctggcttctgcggaaagtcaatcatttgcacagtcacaagcttttcaacaagcttctgccttccaacaggctgcaagtcagtcagccggacaatctgctagtagaagtggatcgagatcgagttcaactactactacaacttctgctgctgcatcccaagcagagtcacagtctgcctcatcatcctcctctagcgcttttgctcaggccgcctcctcaagcctggccacttcaagtgcaatttcacgtgctttcgcttcagtttcttctgcttccgccgcttcctctcttgcctataccattggattgtctgcagcacgtagtcta

SEQ ID NO: 273 - DNA, 513 bp, synthetic construct
  misc_feature 1..513: note = Description of Artificial Sequence: Synthetic polynucleotide
  source 1..513: mol_type = other DNA
ggtatcgcttctgacacagcattagctggagcattggctcaagccgtcgcaggtgttggtgcaggagcctctgcctcaacatacgcaaatgtcatagcgagagcagctggccagttcttggctacacagggtgtcctagacgctggtaatgctagtgctttggctggatctttcgccagagccttgtcagcatctgctgagtcgcaatcttttgcccaaagtcaagctttccaacaggctagtgccttccagcaagcagccagccaatcagctggacaatcagcgtccagagccggttccacgtctagttccactaccacaactacctctgctgccgcaagtcaagcagcaagtcaatccgcttcttcgagtagttcctctgcttttgcacaagctgctagctcctctttggccaccagttctgctatctcgcgtgcctttgccagcgttagctcagcttccgcagcttcttcattggcttatactattggtttatctgctgccagaagttta

SEQ ID NO: 274 - DNA, 513 bp, synthetic construct
  misc_feature 1..513: note = Description of Artificial Sequence: Synthetic polynucleotide
  source 1..513: mol_type = other DNA
ggtattgcttcagatacggctttagctggcgccctagcccaagctgtggccggtgtaggtgctggagcatcggctagtacttacgcaaatgtgattgccagggctgccggtcaatttcttgctactcaaggtgtactggatgctggtaatgcctccgccttggcaggatctttcgctagagctttgagcgcatcggcagaatcacagtcttttgctcaatcccaagcattccaacaagccagtgcgttccagcaggcagcttcccaaagcgcaggacagtctgcttcgagagctggaagtacatcttcatccaccactacgacaacctctgccgctgcctctcaggcagcgagccaatcggcctccagttcttcatcttccgcatttgctcaggctgctagtagctcccttgcaacttcctctgctatatcgagggccttcgcttcagtgtcaagtgcttctgctgcaagttcgcttgcttataccattggattgtcggcagccagatcacta

SEQ ID NO: 275 - DNA, 513 bp, synthetic construct
  misc_feature 1..513: note = Description of Artificial Sequence: Synthetic polynucleotide
  source 1..513: mol_type = other DNA
ggtattgctagtgatactgctttagccggagctctggctcaagctgtggctggtgttggtgcaggagcatctgctagcacttacgctaacgttattgctagagctgccggtcagtttctggctactcagggagttttggatgcaggtaatgcgtctgccctcgcaggttccttcgccagagccctgagtgcctctgccgagtcccagtcatttgctcagagtcaagcttttcagcaagcttcggcctttcaacaagccgcatctcaatcggcaggacagtcagcatctagagcaggtagtacctcaagctcaaccactactaccacctcggttgctgcttcgcaagctgcttcacaatccgccagctcatcttctagttcagccttcgcacaagctgcctcatcctcattggccaccagtagcgccatatcaagagctttcgcaagtgtttcatcagcgtctgctgcatcatccctggcctataccattggattgagtgccgcaaggtcctta

SEQ ID NO: 276 - DNA, 513 bp, synthetic construct
  misc_feature 1..513: note = Description of Artificial Sequence: Synthetic polynucleotide
  source 1..513: mol_type = other DNA
ggtattgcttccgatactgctctggctggagctcttgcacaggctgtggcgggtgttggagctggtgcatctgcctcaacttacgcaaacgtgattgcaagagctgccggtcaatttttggcaactcaaggagtgttggacgctggtaatgcatcagccttagccggatcttttgcaagggctctatctgccagtgctgaatcgcaatcctttgcccaatcacaagcctttcagcaggcttccgcttttcaacaagcagcttcccaaagcgctggacaatcagctagtagggctggaagtaccagctcctcaactactactaccacatccgccgccgcttcgcaggctgcaagtcaatcagcctcctcatctagctcatccgcatttgcacaagctgcttcatcatctcttgcaacttcatctgctatctctagagcttttgctagcgtatcaagtgcaagcgctgcatcttccctagcctatactattggattatctgccgctagatcttta

SEQ ID NO: 277 - DNA, 513 bp, synthetic construct
  misc_feature 1..513: note = Description of Artificial Sequence: Synthetic polynucleotide
  source 1..513: mol_type = other DNA
ggtattgcctcagatactgcattggctggtgctttagctcaggccgttgcaggtgttggagccggtgcctcagctagtacctatgccaacgttattgctagggccgcaggacaatttttggcaactcaaggagttttggatgccggcaacgcttccgcacttgcaggttccttcgcaagagctttgtcagcttcagctgaatcacaatcttttgctcaatcgcaggcgtttcaacaagctagcgctttccaacaagctgcatcacagtcagccggtcagtcagcgagtagagcaggttcaacctccagttctactacgactactactagcgccgctgcttctcaggccgcatctcagtccgcttcctctagttcttcctcagcatttgcccaggctgctagcagctccctagcaacaagttccgcaatatctcgtgcatttgcttccgtttcttcagcatcagcagcctcctcactggcctacacaataggactatctgctgccaggagtcta

SEQ ID NO: 278 - DNA, 513 bp, synthetic construct
  misc_feature 1..513: note = Description of Artificial Sequence: Synthetic polynucleotide
  source 1..513: mol_type = other DNA
ggtgacaccgctgcttcctatggtaatgctttgagcacggcagctggacaattttttgccacggctggattgttaaatgccggaaatgcgtccgcattggcttcaagcttcgccagggctttttctgctagcgctgaaagtcaatcatttgctcagtcccaggctttccagcaagcatcagcatttcaacaagcagcttctagatctgcttcccaatccgcagctgaagctgactcaacgtcatcttcgacaaccacgactaccagcgctgcccggtcccaagctgctagtcaatcggcatctagttcttattcatcggcattcgctcaggcggccagttcaagtttcgcaatcagctctgccttgtcgagagcattttcttccgtttcaagcgcatctgcagcatcttctctagcatatagcatcggcttaagtgccgctaggagcttaggaattgctgacgccaccggccttgctggtgcccttgctcgtgctgtcggtgcgcttggacaa

SEQ ID NO: 279 - DNA, 513 bp, synthetic construct
  misc_feature 1..513: note = Description of Artificial Sequence: Synthetic polynucleotide
  source 1..513: mol_type = other DNA
ggtgcgactgctgcttcctatggtaacgcactgtccacagccgcagctcagttcttcgcgacagcgggtctactcaacgcaggaaacgcatccgcgttagcttcatcctttgcaagagcgttctctgcttccgccgagtctcaatcattcgcacaatcacaagctttccaacaggcaagcgcttttcaacaggccgcatctcgttctgcctctcaaagtgcagccgaggctggttccaccagttccagtaccactactaccacctctgctgcaaggagtcaagctgcctcacaatctgcatcatcttcatatagttccgccttcgctcaagcagcatcgagttcattagctacatcatcagctctatctcgtgcctttagctctgtttcgtccgcttctgcagcttcaagcttagcttattccataggactatctgccgccagaagtttgggcattgcagatgctgccggattggctggtgttttagccagggcagctggagctttgggtcaa

SEQ ID NO: 280 - DNA, 522 bp, synthetic construct
  misc_feature 1..522: note = Description of Artificial Sequence: Synthetic polynucleotide
  source 1..522: mol_type = other DNA
ggtcaatttttggccaaccagggtatactaaacactggaaatgcttcatcgttggcgagttctttcagttctgcgctttccgcatctgctgcagccgcccaaagtcaaagtttcgcgcaatcgcaagctgcggctagcgcatttcagcaggcggcctcccaaagcgctagtcaatcagctgcccaatcgggttcgcaatcatcgtctaccactacaactactagtgcatcaggaagtcagtccgcttcacaaagtgcctcttctagttctgccagcgcctcagccttcgctcagcagagctctgccagtctagctgctagctcttcgttctctcaggctttcgcgtctgctgcatccgcttccgcagttggaaacgtcgcctaccaattgggattgtctgcagcacaatctctcggtattgctaatgctggagctctagcatcagcattagcacaaagcgttagttctgtgggtgtgggtgcatctagttcagcttacgctaacgcagtcgctggagctgta

SEQ ID NO: 281 - DNA, 834 bp, synthetic construct
  misc_feature 1..834: note = Description of Artificial Sequence: Synthetic polynucleotide
  source 1..834: mol_type = other DNA
ggttctcaggcgggttcgcaggcaggatcccaagctggatcgcaggccggatcacaggcggcatcacaagcaggatctcagtcagcctctcaggctagtgctagctcatctgctagcgcatttgcttcggccagtgcgtttgctcagagtgcttctttcgctttatcttcttctagttcttttgcctccgctgtgagctcagccagttcagtctcagcgttgggtaccttaggctatcaagttggactgcaagctgcgggaagcttaggaatctctaatagccaagcatttgcgtcatctatctctcaagctcttacgtctgttggagttggtgcctcctcatccgcttatgcatctgcagtatctggagtggttgctcagtatttgtctggaactggagtattaacatctgcaaacgcacaagctttggctagttctttcgctaatgtatttgctgcatctgccgcctccgcctctgctgcagcctctgcctcttctgctgcttccgcgcagagtgccgcagccgctctcgctcaatcgcagtccgcagcatctgcattctcacaagcggctagtcaggctttttcgcaagctgcatcccaggctggtagtcaagctgcctcacaagctggttctcaagcagctagccaagctggatcccaggccgcctctcaagcaggttctcaggccgcttcacaagctggcagccaagcagccagtcaatctggatctggtgcctcttcgttcactacaacaataagccgttctagtgctggatcgcagacgggttcccaagccggatcccaggcaggcagccaagccggatcacaagca

SEQ ID NO: 282 - DNA, 906 bp, synthetic construct
  misc_feature 1..906: note = Description of Artificial Sequence: Synthetic polynucleotide
  source 1..906: mol_type = other DNA
ggttcacaggcgggttctcaagccggttctcaggcaggttcccaagctggatcacaggcaggatctcaggcaggatcacaagcaggtagtcaagccggctctcaagctgcttctcaggctggatctcagtccgcgtcacaagcctccgcctcttcttctgcatcagcttttgcgtctgccagcgctttcgcacaatctgcttccttcgcactttcttccagtagttcttttgcttctgctgtcagctcggcatcttccatcagcgccttaggaacgttgggatatcaagtcggactgcaagccgccggatctttgggaatttctaactcacaagccttcgcatcttcaatctcacaagcattgacttccgttggtgtcggtgcttcttcttctgcttatgcaagtgctgtatcgggtgttgttgctcagtacctttcaggaacaggtgtgctgacttccgcaaatgcacaggcattggcaagttccttcgctaacgtgttcgcagcttctgcagcgtctgctagtgctgcagcctctgcatcatcagctgctagtgcccaaagtactgctgccgccttagctcaatcgcaatctgcagcatctgctttttcccaagctgcttcccaagcatttagtcaagctgcttcacaggccggttcgcaagctgcttctcaagcaggatcacaggctgcgtcccaagctggttctcaggctgcttcacaagctggatcgcaagctgcttcgcaggctggttcacaggccgcctcacaggctggatcgcaagcagcttctcaatccggatcaggagctagctcatttactaccaccattagcagatccagtgctggatcgcaagcgggatctcaagcaggcagccaagcaggatctcaggccggatctcaagca

SEQ ID NO: 283 - DNA, 834 bp, synthetic construct
  misc_feature 1..834: note = Description of Artificial Sequence: Synthetic polynucleotide
  source 1..834: mol_type = other DNA
ggttctcaagctggaagtcaagctggatcgcaagcaggtagtcaggcaggttctcaggctgctagtcaggccggctctcaatccgcatctcaagcttcagcttcttctagcgcttctgcatttgcttctgcttcggcatttgctcaatctgcctctttcgctcttagttcgtcctcatcatttgctagcgcagtttcaagcgcttcatcggtttcagcattgggcaccttgggataccaagtaggactgcaggcggcaggatcactaggaatttctaattcacaggcttttgcgtcaagtatttcgcaggccttaactagcgttggagttggcgcatctagttctgcgtatgcctctgccgtgtccggagtggtcgcccagtacctgtctggcactggtgtgttaacttctgctaatgcgcaagcacttgcatcatcatttgctaatgtttttgcagctagtgctgcgagcgcttccgcagctgcctcagcttcttcagccgccagcgctcaatcagccgctgccgccttggcccaatcgcagtccgcagcctcagcatttagccaggcagcctcacaggccttctcacaagcggcttctcaggctggctctcaagccgcctcacaagctggtagtcaagccgcatcacaggcaggatcccaagctgcatctcaggctggatctcaagctgcctcccaagcaggtagccaggctgcttcgcaatctggtagtggagcttcctcatttacgactactatttctcgttcatctgctggtagtcagacgggtagtcaagctggttcacaagccggttcacaggctggatcacaagca

SEQ ID NO: 284 - DNA, 906 bp, synthetic construct
  misc_feature 1..906: note = Description of Artificial Sequence: Synthetic polynucleotide
  source 1..906: mol_type = other DNA
ggtagtcaggcaggatctcaagccggatcccaagcgggaagtcaagctggttctcaagctggatcgcaggctggaagtcaggccggatcccaggcaggaagtcaagctgcttctcaagccggaagtcagtcagcctctcaagcctcggcatcttcgtcagcttctgcgtttgcctccgcttctgcattcgctcaaagtgcctcgttcgctttaagttcgtcaagtagtttcgcatcagccgtttcttcagcctcttcgattagtgccctgggaactttgggttatcaggtgggcttacaggctgccggttctttgggcatctcaaatagtcaagctttcgcttcttcgatttctcaggcattgacttctgtcggtgttggtgccagcagttctgcttacgcgtctgctgtatctggagttgttgcccaatatctatctggaacaggtgtgttgacatcggccaatgcacaagctcttgcttcttcttttgccaacgtttttgcagcttcggctgcatcggcatctgccgctgcttctgctagtagtgcaacaagcgctcagtccgctgcagctgcacttgcacaatcgcaagctgccgcttctgcattttcacaagctgcttcccaagcaagttcccaggcttcgagccaggcttcttcccaggcagcttcccaggcctcttcacaagctagctctcaggccggaagccaggctagctcacaggccgcatcccaagctgcaagtcaggctgctagtcaagcagctagtcaagctgcctcccaatctgccgcttcagcacgtgctggagctagcagcgcgtctttcagcgcttcgcagtcaaatgctgcctctcaggctggctctcaagctgcctcacgtgctggctcacaagccgcctcacaggca

SEQ ID NO: 285 - DNA, 429 bp, synthetic construct
  misc_feature 1..429: note = Description of Artificial Sequence: Synthetic polynucleotide
  source 1..429: mol_type = other DNA
ggtggtgctggatctgcaggtggttacggtgagggcgcaggtgcaggtgtcagatcaggcgctggagcctccgccggagctgccggtggttatggaagagctacaggtgcaggtgcaggaggagcagccgcagccggcgcttcaggatatggaggtagctacggagcaggtgccggagctggtgccgcaggtgcgggtggagcatctgcttatggagctggtattggaggtggttatggagcaggcgccgctgatgcctatggtggtggtgcttccgctggagccggtgccggtgcaggagcaggcgtttcaggtggatatggaagagcagctggtgctggagccgctgctgcagctggtgcaaacggctacggtggtagctatgatgctggagtgggcgcaggtacagcaggtgccggtgctggtgca

SEQ ID NO: 286 - DNA, 456 bp, synthetic construct
  misc_feature 1..456: note = Description of Artificial Sequence: Synthetic polynucleotide
  source 1..456: mol_type = other DNA
ggtgcctcaggaggctacggaggaggtgcaggtgagggagctggagctgccgctgcagcaggagctggtgcaggaggtgccggtggatacggtggaggtgctggatccggagccggagcagttgccagagctggcgcaggaggtgcaggaggatacggatctggtataggcggaggttacggttctggtgcaggtgccgcagcaggtgctggcgcaggtggtgctggagcatatggaggaggatatggaacaggagctggtgccggagctaggggtgcggattctgccggcgcagccgccggatatggaggaggcgttggaactggtacgggttcatcggccggatacggtaggggtgccggagctggagcaggcgcgggtgctgccgctggatccggtgcaggtgctgcaggaggttacggtggaggctacggagcaggcgctggtgctggcgca

SEQ ID NO: 287 - DNA, 396 bp, synthetic construct
  misc_feature 1..396: note = Description of Artificial Sequence: Synthetic polynucleotide
  source 1..396: mol_type = other DNA
ggtgccggcggtgcaactggaaaccgtgctggtgacgccttcgcccaggtattcagtcagaatgttattaacagtggagtaattacatcaaccaccgttactaagaattctgcccaggctgctgcatcttctatggtatccacagcggcgaaaagtttgggtttagatgagaataccgcccggtccatggcaaacgctatgtctagctacgctgcagctatggctaagagttttagaaattccgacgaatttataagaaatatgtcataccagatgggaagaatgcttagcaacgctggtgctatcaatgagtctactgcctccgccgcagcaagttctgcatcctcaactgttactgaaacagtgcgcacctacggtccagcagccatattttca

SEQ ID NO: 288 - DNA, 540 bp, synthetic construct
  misc_feature 1..540: note = Description of Artificial Sequence: Synthetic polynucleotide
  source 1..540: mol_type = other DNA
ggtgcaggtgccggtggagccggcggttacgctcagggatatggagccggtgccggtgctggtgcaggtgctggtaccggagctggaggagctggtggatacggtcaaggttatggcgctggttcaggagcgggagcaggtggtgcaggtggttacggagccggagcgggtgctggagcaggtgctggaggagcatcaggttatggacaaggttacggagatggagctggtgctggtgccggcgctgctgccgcagcaggagccgctgctggagctagaggagcaggtggatacggaggtggtgccggagatggagcaggagccggtgctggtgccggagctgctggtggttacggacagggatacggagctggtgagggtgcaggtgctggagctggcgccggtggcgccggaggatatggtgctggtgctggagctggaggcgctggcggttacggacaatcttacggtgacggagcagccgcagctgctggatcgggtgctggagctggtggatctggcggatacggtgctggagca

SEQ ID NO: 289 - DNA, 546 bp, synthetic construct
  misc_feature 1..546: note = Description of Artificial Sequence: Synthetic polynucleotide
  source 1..546: mol_type = other DNA
ggtgcaggtgctggtgcaggtgcaggttcaggtgctggtgctgcaggtggctatggtggtggtgctggcgcgggagttggcgcaggtggagcaggtggatacgatcagggttatggagccggtgccggtgcaggatccggtgctggagctggcggcgctggtggttacggaggaggtgctggtgcgggagcagatgcaggtgccggtggtgcaggtggatacggaggtggagcaggcgctggagctggcgcgagagctggagctggaggcgttggaggttatggccaatcttatggcgccggcgcaggtgccggagcaggtgttggtgccggtggtgctggagccggaggtgccgatggatatggccagggttatggtgctggagcaggtacaggagctggagatgctggaggatacggaggtggtgctggtgctggagcttccgcaggcgccggaggatatggcggcggagcaggtgctggtggtgttggtgtttatggcaaaggatacggttccggttctggagccggagcagctgccgctgca

SEQ ID NO: 290 - DNA, 396 bp, synthetic construct
  misc_feature 1..396: note = Description of Artificial Sequence: Synthetic polynucleotide
  source 1..396: mol_type = other DNA
ggtgcgggaggtgccacaggtaatcgtgccggcgacgcctttgctcaagtcttttctcaaaatgttataaactctggtgtgataacatcgaccactgttactaagaactccgcgcaggccgcggcctcttcaatggtttccaccgcggctaagagcttaggtttggatgagaacactgcacgatcaatggctaacgctatgtcgtcgtacgctgcagccatggccaaatccttcagaaacagtgacgagttcataagaaatatgtcatatcaaatgggaagaatgctcagtaacgctggagctataaacgagtccactgctagcgcagctgcttcctcagcaagctcgactgtgactgagacggtacgtacttacggcccggccgccatattctca

SEQ ID NO: 291 - DNA, 648 bp, synthetic construct
  misc_feature 1..648: note = Description of Artificial Sequence: Synthetic polynucleotide
  source 1..648: mol_type = other DNA
ggtgccggagctggtggcgctggtggttatgcacaaggttacggagctggtgcaggagcaggtgctggtgccggaacaggtgcaggtggtgctggtggttacggtcaaggttacggagcaggatccggcgcgggtgcaggaggagctggtggatatggtgctggtgctggagccggtgctggagccggagatgcctccggatacggtcaaggatatggagatggagcaggagctggtgctggagctgctgctgcagcaggtgccgctgctggtgctagaggagccggaggctacggaggtggtgctggagctggagcgggtgccggtgccggagctgccggaggttatggacagggttacggtgcaggtgccggagaaggagcaggtgccggcgccggtgccggtgccgttgccggtgcaggagctgctgctgctgctggagcaggtgccggtgctggaggtgccgaaggttacggtgctggcgctggtgctggcggtgccggtggttacggtcagagctacggagatggagccgcagctgcagccggctctggcgctggtgcaggtggatcaggcggatacggtgctggtgcaggcgccggatctggtgctggagcagctggcggttatggtggtggagccggtgca

SEQ ID NO: 292 - DNA, 642 bp, synthetic construct
  misc_feature 1..642: note = Description of Artificial Sequence: Synthetic polynucleotide
  source 1..642: mol_type = other DNA
ggtgtgggtgccggaggagaaggcggttacgaccaaggatatggcgctggagcaggagcaggcagcggaggtggtgctggaggtgctggtggttacggtggaggtgccggtgcaggatctggcggtggagctggtggtgccggtggttatggtggaggcgccggagctggagcaggcgctggcgccggaggcgcaggaggatacggtggtggcgccggagcgggaactggtgcacgcgccggtgcaggtggtgtcggaggatatggacaatcctatggcgccggagcctctgccgctgccggtgcaggtgtaggagcaggaggtgctggtgctggtggagcaggtggttatggacaaggatacggtgcaggtgctggtatcggagctggtgacgccggaggctacggtggtggtgccggagccggtgcctcagctggtgctggaggatatggaggtggtgctggcgcaggagctggaggagttggtggctatggtaaaggttatggagccggttctggagctggagctgcagccgccgctggcgctggagcgggatctgccggtggatatggcagaggagacggtgctggagctggaggcgcttctggctatggccagggttacggcgccggtgccgccgca

SEQ ID NO: 293 - DNA, 699 bp, synthetic construct
  misc_feature 1..699: note = Description of Artificial Sequence: Synthetic polynucleotide
  source 1..699: mol_type = other DNA
ggtgctggaagaggttacggtggtggatatggtggtggtgctgctgctggcgctggtgcaggtgcaggagcaggtagaggatacggtggcggttatggcggtggtgctggtagtggagctggaagcggagcaggtgcaggtggtggctctggatacggcaggggtgccggcgctggtgctggcgcaggagctgctgctgcagccggagctggagctggaggtgctggaggttacggaggtggtgctggtgccggagcaggcgcttctgctgccgctggcgcaggtgcaggagccggaggcgcaggaggatatggaggaggttatggaggaggtgctggagcgggagctggcgcaggtgcggccgctgcagccggtgcaggtgctggtgctggtgcaggacgaggatatggaggtggatttggaggaggtgcgggatcgggtgcaggagcaggagcaggagctggaggtggttcaggatacggtagaggtgctggcggttacggaggtggatacggtggtggagctggtactggtgccggcgcagcagccgccactggagctggtgccggtgctggagcaggaagaggttatggcggaggctacggaggaggcgctggagcaggagctggtgcgggagcaggcgccggaggaggatctggatatggtagaggagcaggtgctggagcgtcagttgctgca

SEQ ID NO: 294 - DNA, 429 bp, synthetic construct
  misc_feature 1..429: note = Description of Artificial Sequence: Synthetic polynucleotide
  source 1..429: mol_type = other DNA
ggtggtcaaggtgaccaaggttaccgagtccaaggcggctacggtcctgttagtaatgctgctgcctcggccgcagctgctgcaagcgctggtggtggtcaaggagcaggacagggaggatatggacccagttctggagctgcagcagcttcagcagctggcgattcgggtggaagaggtggacgacagggttacgttggcggagccggcgcaggtgccggatcgggtgctggcggacaaggaggtcaaggtcagtacggaccaggaacgaatggagctgctgctgccgcggcagcctctgctgcctcagctggaggttccggctctcaagtttctcaggatgtagatcaaggatacggaggaggtgctggtctaggaggctctggatctggttctggtgccgctgctgctgcggcagccgctgctgca

SEQ ID NO: 295 - DNA, 447 bp, synthetic construct
  misc_feature 1..447: note = Description of Artificial Sequence: Synthetic polynucleotide
  source 1..447: mol_type = other DNA
ggtggaggttatggaagaggtcaaggtgctggagctggtgttggagctggagccggtgccgcagctggagcagccgctatcgccagagccggtggttacggtcagggagccggaggatatggtcaaggtcaaggagcaggagctgctgcgggtgccgccgctggagcaggcgctggtggctatggtcaaggtgccggtggttatggtaggggccaaggtgcaggtgcaggagcaggtgccggtgccggtgctaggggttacggtcagggtgcaggtgccggcgctgctgccggagccgctgctagcgctggtgctggaggttatggtcaaggtgctggcggttacggccaaggtcaaggtgccggagctgctgctggcgccgctgcttctgccggagctggcggatacggacaaggtgctggaggatacggtcagggtcaaggagca

SEQ ID NO: 296 - DNA, 444 bp, synthetic construct
  misc_feature 1..444: note = Description of Artificial Sequence: Synthetic polynucleotide
  source 1..444: mol_type = other DNA
ggtgctggagcaggagccggagcaggtgctggtggttatggtcaaggatccggtgctggcgccgcagctggcgcagcagccagtgctggagctggtggctatggccagggtgcaggaggatatggccgtggtcagggtgcttcagcaggtgctggagcaggtgcaggaactggtggatatggacagggagctggtgctggtgctgcagccggagccgctgcgtcggccggagcaggaggctatggtcaaggtgccggtggttatggacaaggaacgggagctggagcaggtggttacggtcaaggaacaggtgccggcgctgccgctggagctggtgcctctgctggagcccgaggctatggtcaacgtgcaggaggttatggtcaaggtcaaggagccggtgctgcagctggagctgccgctggtgccggccgatacggacaa

SEQ ID NO: 297 - DNA, 600 bp, synthetic construct
  misc_feature 1..600: note = Description of Artificial Sequence: Synthetic polynucleotide
  source 1..600: mol_type = other DNA
ggtgctggttatggcgctggtgcgggcgctggtgcaggttacggtgctggtgcaggagccggagccggtgcgggtgcagttgctgcgggtggcgccggcgctggtgcaggaagaggttatggtgcaggagcaggagctggcgcaggtgcagctggaggtgcaggagctggtgcaggtgcaggttatggtgccggcgctggtcgtggatatggtgctggtagtggtgctggagctggcgctggcgctgcaggcggagcaggtgctggtgctggagctggatacggcgccggagctggtgcgggagctggagccgcctcaggagctggagccggtgcaggctatggtgccggagcaggacgtggatatggagcaggagccggtgctggttccggcgccggtgcaggagctggagctgcaggtggcgctggagcaggatacggagccggagctggtgctggagcaggaagtggcgccgctgcagctggtggagcgggagctggagctggctatggagctggagctggtagaggttatggagctggagcaggtgccggttctggtgctggtgctggtgccggtgaagcgggaggagctggtgca

SEQ ID NO: 298 - DNA, 636 bp, synthetic construct
  misc_feature 1..636: note = Description of Artificial Sequence: Synthetic polynucleotide
  source 1..636: mol_type = other DNA
ggttatggagcaggagccggaaggggttacggtgctggagcaggtgccggagcaggcgcagttgccgcatcaggtgctggcgcaggcgctggttacggagcgggagcaggtgcaggagcaggagcaggttacggtgccggagcgggtcgtggatatggtgcaggagccggagcaggtgctggttcaggagctgcctcaggagctggcgccggagccggttacggtgcaggtgccggtgcgggtgctggctatggtgccggagccggaagtggttatggtaccggagccggagctggtgccggagccgcagctgctggaggtgcaggtgcaggcgcaggatatggagcaggagcaggaaggggttatggtgctggagccggagccggtgctgcatccggtgctggtgcaggtgctggagctggtgctgcttcaggagcaggtgctggaagtggttacggagcaggagcagctgcagctggtggagccggcgctggtgctggtggaggttatggtgctggtgctggccgtggttacggagctggagccggtgccggcgcaggcgcaggttctggctcaggttcggcagctggatacggtcagggttacggatcaggtagcggtgctggtgctgccgca

SEQ ID NO: 299 - DNA, 618 bp, synthetic construct
  misc_feature 1..618: note = Description of Artificial Sequence: Synthetic polynucleotide
  source 1..618: mol_type = other DNA
ggtgctgcagccagcggagcaggagctggtggtgctggaggatatggtagaggagctggagcaggtgctggtgccggtgccggatctgctgcaggcaacgcttttgcacaatctctttcttctaacttactaagttcgggagactttgtgcagatgatttcgtccacaacttctaccgaccaagccgttagtgtggcaacctcagttgctcaaaacgtaggaaatcaattgggtctagacgcaaacgcaatgaattctctgctgggagctgtttcaggctacgtatctactttaggaaatgcgatcagtgatgcttccgcatatgctaacgctatatcgtcagctattggaaatgttctggccaactcaggatccatctctgaatctaccgcttcatctgctgccagctcagctgcttcgtctgtgactacgacacttacttcttatggtccagcagtgttttacgcaccaacttcttctgctggcggttacggtggattggttggttatggagctggtgctggagcagctgcaggcgcaggagccggtgccggcggtgctggaggttacatcggccagggtggatatggcgctggtgccggagccgcggccgcagca

SEQ ID NO: 300 - DNA, 435 bp, synthetic construct
  misc_feature 1..435: note = Description of Artificial Sequence: Synthetic polynucleotide
  source 1..435: mol_type = other DNA
ggtggttacggagctggtgctggtgccgttgccgctgctggcgctgctggagctggaggttacggtcgaggcgcaggaggatatggtggtcaaggcggatatggagctggcgccggtgcaggcgctgcagccgccgccggtgcgggtgctggaggagcaggtggatatggacgtggagctggagctggcgcaggagcagccgctggtgcaggagctggcgccggaggagctggctatggcggacaaggtggttacggtgccggagccggtgccggagctgcagcagcagctggagcgggtgctggtggtgccggaggctatggtagaggagcaggtgctggtgctggcgctgccgcaggcgcaggagccggtggttacggtggacagggtggatatggagccggcgctggagcaggtgctgctgcagctgcagca

SEQ ID NO: 301 - DNA, 450 bp, synthetic construct
  misc_feature 1..450: note = Description of Artificial Sequence: Synthetic polynucleotide
  source 1..450: mol_type = other DNA
ggtgctggatcaggcggagccggaggttatggtaggggtgccggtgccggtgccggcgccgccgctggtgcaggagccggtgcaggatcttatggaggacaaggtggttatggtgcgggagctggagcaggtgccgcagctgcagcgggagctggtgctggtgccggtggatacggtcgaggagctggtgccggagctggagctggagccggtgctgctgcaagagcaggagccggagctggaggtgcaggatacggcggccagggtggatatggagccggtgccggtgctggtgctgctgccgctgctggcgctggcgccggtggtgcaggaggatacggtagaggagcaggtgcaggtgctggtgctgcagcaggtgctggagccggagcaggtggttacggtggacaaagcggctacggtgcaggagcaggtgcagctgctgcagca

SEQ ID NO: 302 - DNA, 459 bp, synthetic construct
  misc_feature 1..459: note = Description of Artificial Sequence: Synthetic polynucleotide
  source 1..459: mol_type = other DNA
ggtgctggcgccggcggagctggaggttatggacgaggcgccggagcaggtgccggagctgctgctggagcaggtgctggtgctgctgcaggtgcgggcgcaggtggttacggtggtcaaggcggctacggagctggtgccggagcaggtgctgctgcagctgctggcgccggagcaggaggcgctggaggatacggaaggggcgctggtgctggagctggtgtcgcagcaggtgcaggcgccggaggatacggtggacaaggtggatatggagccggtgcgggagcgggagcagcagctgccgcagctactggtgcaggtggtgctggtggttatggtcgtggagctggtgctggagcaggagctgcagcaggagctggagccggtactggtggcgctggatacggaggtcagggaggttacggagctggcgccggagctggagctgccgctgctgca

SEQ ID NO: 303 - DNA, 483 bp, synthetic construct
  misc_feature 1..483: note = Description of Artificial Sequence: Synthetic polynucleotide
  source 1..483: mol_type = other DNA
ggtgcaggagccggaggagctggttatggaagaggtgctggagcgggagctggagcagcagcaggagctggtgcaggagctgctgccggagccggtgccggagccggtggttacggaggtcaaggtggttatggcgcaggagccggagccggcgctgcggctgctgccggtgccggtgctggtggcgccgctggctattccagaggtggaagagctggagcagccggtgcaggtgctggagcagcagctggtgctggagccggagctggtggttacggtggacaaggcggttacggtgctggtgcaggagcaggtgctgcggctgcggcaggtgcaggatcaggtggtgccggcggatatggtaggggcgccggtgcaggagcggccgctggtgctggtgcagcagccggcgctggagccggtgctggaggatatggaggtcagggaggttacggtgctggagcaggagccgctgcagcagca

SEQ ID NO: 304 - DNA, 537 bp, synthetic construct
  misc_feature 1..537: note = Description of Artificial Sequence: Synthetic polynucleotide
  source 1..537: mol_type = other DNA
ggttatggagcaggtgctggtgcaggtgctggaaccggtggtgccggaggatatggacgcggtgtcggagccggagccggagctggagctggtgccggtggagctggaggatatggtggtggacaaaactacggtgcgggagctggtgctgccgccgcagcaggagcaggcgctggtgcaggtggcgcaggtggctacggaaggggcgccggagcaggagctggcgccgctgctggtgctggtgctggagctgctgctggagctggtgctggtggtgccggaggttacggtacaggccaaggatatggagaaggagcgggcgctggtgccggtgtaggagcaggcggtgcaggtggttacggcagaggtgcaggtgccggtgctggagctggagccggcggatacggtgccggccagggttacggtgctggagcaggagcaggtgctgctgctgcagccggagcaggagccggagccggtggtgccggtggatatggacgtggagctggtgcaggagcaggtgcaggagccgctgca

SEQ ID NO: 305 - DNA, 492 bp, synthetic construct
  misc_feature 1..492: note = Description of Artificial Sequence: Synthetic polynucleotide
  source 1..492: mol_type = other DNA
ggtgccggagcgggaggtgccggaggatacggagccggtcaaggatacggtgccggcgccggcgcaggagcagctgccggagccggtgctggaggagctagaggttacggagcgagacaaggatacggcagtggtgccggtgcaggtgctggagcaagagctggtggagccggaggatacggtagaggagccggagccggtgcagctgccgcctcaggagctggtgctggaggatacggcgctggtcaaggttatggagccggtgctggcgcagtggcctccgctgctgccggtgccggatccggagcaggaggcgctggtggctatggaagaggtgccggagctgtagccggcgctggagctggtggtgctggtggttacggcgctggcgcaggtgctgctgcaggagtaggtgcaggaggaagcggaggttacggtggacgtcaaggcggttattctgctggtgctggtgcgggtgcagcagccgctgca

SEQ ID NO: 306 - DNA, 546 bp, synthetic construct
  misc_feature 1..546: note = Description of Artificial Sequence: Synthetic polynucleotide
  source 1..546: mol_type = other DNA
ggtggtgctggaggatatggtgtaggccaaggttatggagcaggagcgggtgccggcgctgccgcaggtgctggagctggaggcgctggtggatatggtgcaggacagggttacggagctggagccggcgtaggagctgctgctgcagctggagccggagccggtgttggcggagctggcggatatggccgaggagcgggagccggtgctggagcaggtgcaggagcagccgcaggagcaggagcaggtgctgcagccggagctggtgccggcggagcaggtggatatggagcaggacaaggttatggcgctggtgccggtgtaggagcagctgcagctgcaggagctggagctggcgtcggtggagccggtggttacggtagaggcgctggcgcgggagccggagctggagcgggaggtgctggaggttacggcagaggcgctggtgctggcgctggtgctggagccggtgccggtggagcaggtggttatggagctggccaaggttacggagctggtgctggagctggcgctgcagccgcggca

SEQ ID NO: 307 - DNA, 600 bp, synthetic construct
  misc_feature 1..600: note = Description of Artificial Sequence: Synthetic polynucleotide
  source 1..600: mol_type = other DNA
ggtgctggagctggagcaggaggtgcaggcggatacggtagaggtgctggagccggagcgggagctggtgcaggagctggtggagctggtggttacggtgctggccaaggatacggagctggtgccggagctggagccgccgccgctgccggtgcaggagccggtgctggaggagctggaggttacggtagaggagcaggagcaggtgcaggagcaggcgctggagccggaggtgccggtggatacggtgccggacaaggctatggcgcaggtgcaggtgcaggagctgctgctgccgccggagctggtgctggagctggaggcgctggtggttatggaagaggcgctggtgcgggagccggcgctggcgcaggcgccggtggagctggaggatacggaagaggagctggtgctggtgcgggcgctggtgctgccgctggagccggagcaggtggtgctggaagatacggcgccggacaaggttacggtgctggtgctggagcaggcgctgctgccggtgcaggtgctggtggtgcaggaggttatggtgcaggtcagggttatggagctggagctggtgccggtgcagctgctgcggca

SEQ ID NO: 308 - DNA, 558 bp, synthetic construct
  misc_feature 1..558: note = Description of Artificial Sequence: Synthetic polynucleotide
  source 1..558: mol_type = other DNA
ggtgctggtgccggtgtcggaggtgcgggtggatacggaagtggtgctggcgccggagctggtgccggtgcaggagctgcctcaggcgccgcagctggtgctgctgctggtgccggtgccggtggcgcaggcggatacggtacaggacagggttacggtgccggagcaggagccggtgcaggcgccggtgcaggcggtgctggtggatacggtcgaggcgctggtgctggtgccggagctggtgctggtggtgccggtggctatggcgccggtcaaggttacggagccggtgcaggtgctggtgccgctgctgctgctggagatggcgcaggagctggaggcgctggtggttatggtagaggagctggcgccggtgctggcgctggtgcagctgctggagctggagcaggtggtgctggtggatatggagccggacaaggttatggtgcaggtgctggagccggtgctgctgcaggagctggtgcgggaggagctggaggatatggcgctggacaaggatatggtgctggagcaggtgctggtgctgcagccgctgca

SEQ ID NO: 309 - DNA, 546 bp, synthetic construct
  misc_feature 1..546: note = Description of Artificial Sequence: Synthetic polynucleotide
  source 1..546: mol_type = other DNA
ggtgctggtgctggtgtcggtggcgctggtggttatggtagaggcgcaggagcaggtgctggagctgctgccggagcaggagccggtgctgctgccggagctggtgcgggaggagctggtggatacggtactggtcaaggatacggcgctggcgccggagcaggtgcgggtgctggaggtgctggtggttatggaagaggtgctggagctggagctggagccggtgcgggagccggcggtgcaggtgaatatggagccggtcagggatacggagctggagcaggcgcaggagctgctgctgctgctggcgcaggagctggtgccggaggtgctggaggttacggacgaggtgctggtgcaggtgcaggtgcaggagcggctgctggagccggagctggaggtgctggcggttacggtgctcgccaaggttacggagctggtgccggcgctggtgccgctgctggagccggtgcaggtggagcaggtggctacggtgctggtcaaggttatggagctggtgctggtgctggtgcagccgcagctgca

SEQ ID NO: 310 - DNA, 480 bp, synthetic construct
  misc_feature 1..480: note = Description of Artificial Sequence: Synthetic polynucleotide
  source 1..480: mol_type = other DNA
ggtgcaggcgcaggcgctggtggagccggtggttacggtagaggagctggtgccggagccggtgcaggagccggagctgcagcaggacagggatatggttcaggagctggagcaggagccggtgcttctgcaggaggagctggtagttacggaagaggcgcaggagctggagctgcagccgcaagtggagctggtgcaggaggttacggtgccggtcagggatacggcgccggtgccggagccgttgctagcgctgctgccggagctggatcgggtgctggaggcgctggtggatatggtagaggcgccgtagctggatctggtgccggtgctggagccggagcaggtggtgctggaggatacggagcgggagccggtgccggtgctgcagccggcgctgtagccggtggaagtggaggatacggtggtcgtcaaggaggttactccgcaggtgctggcgccggagcagcagccgccgca

SEQ ID NO: 311 - DNA, 576 bp, synthetic construct
  misc_feature 1..576: note = Description of Artificial Sequence: Synthetic polynucleotide
  source 1..576: mol_type = other DNA
ggtgctggtgccggagccggtggagcaggaggattcggacgtggcgccggtgctggcgctggtgccggcgctggcgctgcagctggtgcaggcgccggaggagcaggcggatacggagctggtcaaggatacggcgcaggagctggtgcaggtgccgccgctgctgctggcgctggagcgggtgcgggtggtgcaggtggttacggcagaggtgccggtgccggtgctggtgccggtgctgctgcagctgctggagcgggagctggcggagcaggaggttacggagcgggccagggttatggagccggtgctggagccggagccgcagcagctgctggtgcaggagctggaactggaggagcaggtggttatggcgctggtcaaggctacggagctggagctggcgcgggagctggcgctggagcaggagcaggagcaggtggtgcaggtggatatggtagaggtgcaggagccggcgccggagccggagccggagctggtggagcaggtggatatggcgtaggtcaaggatacggtgctggagcaggtgctggtgcaggtgcaggatccgcagca

SEQ ID NO: 312 - DNA, 384 bp, synthetic construct
  misc_feature 1..384: note = Description of Artificial Sequence: Synthetic polynucleotide
  source 1..384: mol_type = other DNA
ggtaacgcattcgcacagagtttgtcatccaacctcctttcttcaggtgactttgttcaaatgatctcgacaaccacttctaccgaccaagcagttagtgttgcaacttctgttgctcaaaacgtaggaaaccaattgggtctagatgcgaatgctatgaacaacttgttggccgcagttggtggttatgtgtcctcattgggaggtgccgttgcagacgctgctgcttacgccaatgcaattagctcagccatcggtaacgttctcgcaaatacgggctctattaatgaatcaacagcaagttccgcagcttcgagcgccgcttcatccgtcactactaccttgacttcatacggacctgcagtgttctacggaagaggtgca

SEQ ID NO: 313 - DNA, 435 bp, synthetic construct
  misc_feature 1..435: note = Description of Artificial Sequence: Synthetic polynucleotide
  source 1..435: mol_type = other DNA
ggtgctggtgcaggtggcggctatggaggtggatatggtgcaggtggaggagcaggagctggagccggcgcgggtgctggtgccggagccggtgctggtgctggtcgtggtggagcaggaggatatggcgctggagcaggtgccggtgccggtgccgctgccgcagctgctgccggagccggagccggaggaggatatggaggaggatatggtgctggcgttggcgcgggcgctggtgcaggtgccggagctggtggtggttacggaggtggttatggagctggcgctggtgctggagctggtgctgctgctgctgcagctgcgggtgctggtgcaggcggaggttacggtggcggatacggtgcaggcggaggagcaggagcgggagccggagcaggagctggtgcaggtgcaggtgccggtgcaggtagagga

SEQ ID NO: 314 - DNA, 441 bp, synthetic construct
  misc_feature 1..441: note = Description of Artificial Sequence: Synthetic polynucleotide
  source 1..441: mol_type = other DNA
ggtgctgtgggttatggagctggagcaggtgcaggagctgcagcagcggctgcagcgggagctggagctggaggcggttatggtggtggttatggtgctggtggtggtgctggagctggagctggtgcgggagccggtggcggatacggtggtggatatggagctggtggtggcgcaggagccggagctggagcaggcgctggtgcaggtagaggaggtgctggaggatacggtgccggtgctggagcagcagctggtgcagctgctgccgccgcagccggtgctggagctggtggaggctatggaggaggatacggagctggaggtggtgccggtgcaggtgctggagcagctgctggagcaggtgccggcgcaggtaggggaggagctggaggatatggagccggagccggtgcaggagcaggtgcagccgctgctgca

SEQ ID NO: 315 - DNA, 396 bp, synthetic construct
  misc_feature 1..396: note = Description of Artificial Sequence: Synthetic polynucleotide
  source 1..396: mol_type = other DNA
ggttcaggtgctggcgccggttctggatacggcgctggtgctggagctggtgcaggctctggttatggagcgggttctagtgctagtgcaggctctgctattaatactcaaacagttacgagtagtactacgacttcatcacaatcatctgccgctgcaactggtgctggttacggtacaggtgctggcaccggagcctcagctggtgccgcagccagtggcgctggtgccggatacggaggacaagctggatacggtcaaggagctggagctagcgctagagctgccggatccggttacggagctggagcaggcgcggctgcagctgcaggttccggctatggtgctggtgccggtgctggagccggttcgggttatggcgctggagctgctgca

SEQ ID NO: 316 - DNA, 522 bp, synthetic construct
  misc_feature 1..522: note = Description of Artificial Sequence: Synthetic polynucleotide
  source 1..522: mol_type = other DNA
ggtagtggatacggagcaggcgcaggtgctggtgccggcagtggttacggtgccggagccggtgctggaagcggttatggcgcaggagctggagctggtgctggctcaggctacgttgccggagcaggagcaggtgcaggtgctggttctggatatggagctggagcaggcgctggagctggttcctcatattccgctggtgcaggagccggtgctggttctggttatggcgctggtagttctgcttctgccggctcagccgtctcaacacaaactgtttccagttcagcaacgacctcgtcacagagtgccgcagctgctactggagcagcatacggtacccgagcatcaactggaagtggtgcttctgctggagctgcagcatcaggtgctggagctggttacggaggtcaggccggttatggtcaaggaggaggagctgcagcctatagagctggcgcaggatcccaggccgcttatggacaaggtgcctcgggctcatctggtgcggcagctgcagca

SEQ ID NO: 317 - DNA, 504 bp, synthetic construct
  misc_feature 1..504: note = Description of Artificial Sequence: Synthetic polynucleotide
  source 1..504: mol_type = other DNA
ggtgcaggagctggatacggaggtcaagtcggttacggccagggtgctggcgcctcagcaggtgccgccgcagctggagccggcgccggatatggaggacaggctggttacggacaaggagccggtggatccgctggtgcagcagcagctggcgctggtgctggtagacaagcaggttacggtcagggtgcaggagcatctgctcgtgcagcagccgctggagctggcacgggatatggtcagggtgccggtgcatccgctggagccgcagcagctggtgctggtgctggttcccaggtgggatacggacaaggtgctggtgcatcctccggtgctgctgctgctgcgggtgctggtgcaggatacggcggtcaagttggttacgagcaaggcgcaggagcttcagctggagctgaagccgcagcttcatcagctggtgccggatatggtggtcaggccggttatggacaaggcgctggcgcctctgcaggtgcagcagccgca

SEQ ID NO: 318 - DNA, 594 bp, synthetic construct
  misc_feature 1..594: note = Description of Artificial Sequence: Synthetic polynucleotide
  source 1..594: mol_type = other DNA
ggtgccggtgctggatatagaggtcaggccggttacatacagggagctggtgcctctgctggtgcagctgctgctggagctggcgtaggttatggtggacaagccggctatggtcagggcgccggcgcctctgcaggagccgcggccgcagccggtgctggtgctggcagacaagctggatatggccagggcgctggagcatcagctggagctgccgcagcgggagccggtgctggtagacaggcaggttacggtcaaggtgcaggagcctccgccggagctgctgcagcaggagctgatgctggttatggcggacaagccggttacggacaaggagcaggagcttctgcaggcgcagcagcatcaggtgcaggagctggttatggtggccaagctggctatggtcaaggcgctggtgcttctgccggtgctgcagctgctggcgctggagctggctatctaggacaggctggatacggacagggtgctggagcttctgctggcgccgctgccggagcgggtgccggatatggtggtcaggcaggttatggacaaggtactggagcagcagcttctgccgctgcctcaagtgca

SEQ ID NO: 319 - DNA, 537 bp, synthetic construct
  misc_feature 1..537: note = Description of Artificial Sequence: Synthetic polynucleotide
  source 1..537: mol_type = other DNA
ggtggtcctggaggtccaggtggaccaggtggagcttatggtcctggagctggcggacctagcggtcctggaggagcaggtcctggaggtgttggaccttacggtccaggaggagttggtcctggaggagtcggtccgggaggtgcaggagtaggtcctggaggagctccaggtgcaccaggaggcccaggtggccctggaggtcctggaggtcctggtggagtcggaggacctctgggtgcaggtgcaggtggagtcggacctggaggagcgggagcttatggacctggaggtgccggagcatacggacctggaggagtaggacttggtggtgctggcgcttacggtcccggaggagctggaccaggaggcgcaggtccacacggtcctggcggacctggtggagcaggtccaggaggtgaaggacctgtgacagttgatgttgaagtatctgtcggtggcgctcccggaggcggatcaggaggtgttggaccaggaggagcaggagtcggaccaggtggtgctccaggtgcccca

SEQ ID NO: 320 - DNA, 804 bp, synthetic construct
  misc_feature 1..804: note = Description of Artificial Sequence: Synthetic polynucleotide
  source 1..804: mol_type = other DNA
ggtggcgcaccaggtggtggaccaggaggtgccggtccgggcggtgccggatttggacccggaggaggagccggattcggccctggaggaggtgccggtttcggcccaggaggtgctgccggaggaccaggtggtcctggtggacctggaggtccaggtggagctggtggatacggtccaggaggagctggaggatacggaccaggaggtgtcggtcctggtggagctggaggatatggacctggaggtgctggaggttacggtccaggaggttccggtccaggtggtgccggaccgggtggtgccggtggcgagggtccggttactgtagacgttgatgttactgttggacctgaaggagtgggaggaggaccaggtggcgccggtccaggaggtgcaggattcggcccaggtggcggagcgggtttcggtccaggtggcgcccctggagccccaggaggaccaggaggtcctggaggaccgggtggtccaggaggtccaggaggtgtaggaccgggtggagctggaggttacggccctggtggtgctggtggagtaggaccggctggtactggaggattcggtcctggaggagccggtggttttggacctggtggagcaggaggttttggtcctggaggagcaggtggattcggaccaggaggtgctggaggatatggtccaggtggtgttggtcctggtggtgcaggaggttttggacctggaggagttggtccaggaggatcaggacccggaggagctggtggtgaaggaccagtaacagtagatgtagacgtctcagta

SEQ ID NO: 321 - DNA, 804 bp, synthetic construct
  misc_feature 1..804: note = Description of Artificial Sequence: Synthetic polynucleotide
  source 1..804: mol_type = other DNA
ggtggagctcctggtggtggtccaggaggagctggtcctggtggagccggatttggtccaggtggtggcgcaggttttggcccaggtggtggagctggatttggaccaggcggagctgctggcggtcctggtggtccaggtggaccaggaggtccgggaggagcaggaggttacggaccaggtggcgccggaggctacggaccaggcggcgttggtccgggtggcgctggtggatacggacccggaggagctggaggatatggtccaggaggttctggacccggcggcgccggtcctggaggagcaggtggagagggacctgtgactgtagacgtggatgtgacagttggtcctgaaggtgttggaggaggcccaggaggtgcaggccctggaggtgccggtttcggtccaggtggtggtgcaggattcggacctggcggtgcaccaggagccccaggtggcccaggtggtcctggaggtccaggaggacctggtggacctggtggtgttggacctggaggtgcgggcggttatggaccaggtggagcaggaggagtaggaccagcaggtactggtggctttggccctggtggtgccggtggtttcggcccaggaggtgctggtggtttcggacctggtggtgcaggaggatttggtccagcaggtgctggcggttacggacctggtggagttggacccggcggtgctggaggattcggaccgggaggagttggcccaggtggttcgggtcctggtggagctggaggagagggtcctgttaccgtcgatgtagacgtttctgta

SEQ ID NO: 322 - DNA, 804 bp, synthetic construct
  misc_feature 1..804: note = Description of Artificial Sequence: Synthetic polynucleotide
  source 1..804: mol_type = other DNA
ggtggtgcccctggtggaggaccaggtggagctggcccaggaggtgctggttttggaccaggtggaggagctggatttggacctggtggtggagccggcttcggaccaggtggagcagccggtggtccgggtggtccaggaggtccaggtggaccaggaggagctggtggttatggccctggaggtgctggaggatatggtccaggcggtgtgggtccaggtggagctggtggctatggtcccggtggcgctggcggatacggaccaggtggaagcggccctggaggcgccggaccaggtggtgccggtggtgaaggaccagtcaccgtcgacgtagacgttactgttggacctgagggagtcggtggaggacccggcggtgccggtccaggaggcgccggtttcggtccaggaggaggtgccggtttcggccctggtggagccccaggagctccaggcggccctggaggtccgggaggtcctggaggaccaggaggtccgggtggcgttggaccaggtggtgcgggaggttatggtccaggtggagccggtggatttggtcctggaggcacaggcggatttggacctggaggcgctggtggttttggacctggtggcgcaggaggatttggtcctggcggtgccggaggattcggtcctggtggagctggaggatacggtccaggaggtgttggtccaggaggtgctggaggtttcggaccaggcggtgttggacctggaggaagtggtcccggcggtgccggaggtgaaggcccagttactgtggatgtcgacgtttctgta

SEQ ID NO: 323 - DNA, 570 bp, synthetic construct
  misc_feature 1..570: note = Description of Artificial Sequence: Synthetic polynucleotide
  source 1..570: mol_type = other DNA
ggtgttagttacggacctggaggtgcaggtggtccttatggtccgggtggtccttacggaccaggtggagaaggtccaggtggagcaggaggaccttatggccctggtggtgttggaccaggaggcagtggtcctggaggttacggacctggtggagcgggcccaggaggatatggacctggcggatctggacctggcggatatggacctggtggatcaggacctggaggttatggcccaggaggaagtggtccaggcggatacggacctggtggttccggtccaggtggttacggaccaggaggatatggcccaggtggatctggtccgggcggatcgggacctggaggtagcggacctggaggatatggtcctggcggtactggtccaggtggttcaggcccgggaggttacggtcctggaggttcgggtccaggaggatctggtccaggcggttatggtccaggtggtagtggacctggaggatttggaccaggtggttccggacctggaggttacggtccaggaggatcgggtcctggaggcgcaggaccaggtggagtaggtcca

SEQ ID NO: 324 - DNA, 690 bp, synthetic construct
  misc_feature 1..690: note = Description of Artificial Sequence: Synthetic polynucleotide
  source 1..690: mol_type = other DNA
ggtggatttggaccaggtggtgctggacccggaggcgctgcaccaggtggtgccggtcctggcggtgccggtccaggtggagccggccctggaggcgccggtccaggaggcgccggtcctggtggcgcgggtccaggtggagctggaggtgcaggaggtgctggtggcagcggtggtgccggaggatctggtggtactacaataattgaagatctggatatcacaattgacggcgcggatggccctattactatttctgaagagcttcctatttctggagccggtggatctggtcctggtggcgctggtcccggaggagttggaccaggaggatctggaccaggcggagttggtccaggtggttccggtccaggcggagttggacctggtggttcgggccctggaggtgtgggtccgggcggtgctggaggcccctatggtccaggaggatccggtcctggcggagctggtggagcaggaggtccaggtggtgcttatggacctggaggatcctacggacccggaggttcaggtggtccaggaggagcaggaggcccttatggtcctggaggagagggtcctggaggcgctggtggtccttacggtccaggaggtgcaggtggtccttatggtccaggtggagcaggcggtccatacggaccaggaggagaaggcggtccatatggccca

SEQ ID NO: 325 - DNA, 630 bp, synthetic construct
  misc_feature 1..630: note = Description of Artificial Sequence: Synthetic polynucleotide
  source 1..630: mol_type = other DNA
ggtggatcttacggacctggaggcgctggcggaccatatggacctggcggtccatatggtccaggtggagagggacctggtggtgctggtggaccatatggaccaggaggtgtcggtccaggaggaggaggtcctggcggttatggacctggtggcgcgggacctggaggctacggaccaggtggatctggtcccggcggttacggaccaggtggtagcggccctggtggatatggtcctggtggctccggtccgggtggttatggtccaggtggttctggccctggtggttatggaccaggtggttccggtccaggtggctcaggccctggaggatacggacctggtggctcaggtcctggaggaagcggacctggtggctatggcccaggaggtagtggtcccggcggatatggtcctggaggatcgggaccaggtggctcaggaccaggaggttatggtcctggaggttcgggacctggtggttctggtccaggtggttacggaccaggaggatcaggacctggaggattcggtccaggaggatttggaccaggaggctcaggaccaggtggatacggcccaggcggttctggtccaggaggcgccggcccaggtggtgttggtcca

SEQ ID NO: 326 - DNA, 699 bp, synthetic construct
  misc_feature 1..699: note = Description of Artificial Sequence: Synthetic polynucleotide
  source 1..699: mol_type = other DNA
ggtggatttggtccaggtggcgcaggccctggaggtgcaggccctggtggagcaggtcctggtggagctggccctggaggtgccggccctggaggagcaggtccaggtggcgctggacctggcggcgctggacctggtggagccggtggtgctggcggtgctggcggtgccggaggatcaggaggcgcgggaggcagcggtggaactactattatcgaagatttagacatcaccattgatggagctgatggccctatcacaatttccgaagaattgactatatccggtgcaggtggcagtggaccaggaggagctggtcctggtggagttggaccaggtggaagcggacctggtggtgttggcccaggtggtagtggtcctggaggagttggtccgggaggatccggacccggaggtgtcggtcctggtggagccggaggtccatacggaccgggtggatccggacctggcggcgccggtggagctggaggacctggtggtgcatatggaccaggtggatcctatggaccaggaggaagtggtggccccggtggagctggtggcccatacggaccaggaggcgaaggaccaggtggagcaggtggcccttacggaccaggtggtgccggaggtccttacggtcctggtggcgccggaggtccatatggtccaggcggtgaaggtggcccttatggtcca

SEQ ID NO: 327 - DNA, 540 bp, synthetic construct
  misc_feature 1..540: note = Description of Artificial Sequence: Synthetic polynucleotide
  source 1..540: mol_type = other DNA
ggtggtagctatggtccaggtggagctggaggtccttacggaccaggtggtccatacggccctggtggagaaggtccaggaggtgccggtggtccttatggacctggcggagttggcccaggtggaggcggtccaggaggttacggtccgggaggtgccggaccaggcggatacggacctggcggatcaggaccaggtggatacggccctggaggctcaggaccaggaggatacggcccaggtggatccggccctggtggttacggccctggaggatcaggacctggtggatatggtccaggtggtagtggtcctggtggttcaggacctggaggttacggtccaggtggttccggtccaggaggctatggtccaggaggatccggtcctggaggatccggaccaggcggctatggacctggaggttcaggtccaggtggattcggacctggaggttttggacctggaggatcaggtccaggaggttatggtccgggaggatcgggtcctggtggtgctggaccaggaggtgtaggacca

SEQ ID NO: 328 - DNA, 699 bp, synthetic construct
  misc_feature 1..699: note = Description of Artificial Sequence: Synthetic polynucleotide
  source 1..699: mol_type = other DNA
ggtggttttggacctggtggagctggaccaggaggagccggacctggtggtgcaggcccaggaggagctggaccaggtggtgctggtccgggtggtgccggtccaggaggtgctggtcctggtggagcgggtccaggtggagcaggaggtgctggtggagctggaggagctggaggtagcggtggtgcaggaggttctggaggaacaaccatcatcgaagatttagatatcactatcgatggagctgacggcccaatcacaatatccgaggaacttacaatctctggagccggtggatcaggtccgggtggtgctggacctggtggtgtaggacctggtggatcaggaccgggtggtgttggacccggaggtagcggtccaggaggcgttggtcctggtggctcaggagccggtggagtgggtccaggaggtgccggaggaccttatggtcctggtggatctggaccaggtggagctggaggcgcaggaggacctggaggtgcctatggtcctggaggttcgtacggaccaggtggatcgggtggtcctggaggagcaggaggaccttacggtcctggtggtgaaggtcctggaggtgctggtggtccatacggcccaggtggagctggtggtccttacggacctggtggagccggaggtccttatggtccaggtggtgaaggaggaccatacggccca

SEQ ID NO: 329 - DNA, 855 bp, synthetic construct
  misc_feature 1..855: note = Description of Artificial Sequence: Synthetic polynucleotide
  source 1..855: mol_type = other DNA
ggtgcaggtggttcaggaccaggtggtgctggtccaggaggcgctggcccaggtggagctggacctggtggtgccggacctggtggcgctggtcctggaggagttggaccaggcggtgccggtggacctggaggtgctggtggtccatttggtcctggaggttctggacctggcggagctggaggagcgggtggtccatacggtcccggtggagcgtatggccctggaggaccaggtggaccaggaggaccaggcggaccaggttctggtggaccatacggaccaggaggtgcctatggtccaggtggagcttacggtcctggcggtgcttacggaccaggtggtgcaggcggaccaggtggagcaggtggcccatacggtcctggaggtccttatggacctggcggaccatatggacctggtggtgcaggtggtccaggcggagctggtggtccatatggcccaggcggagcaggtccaggaggatatggccctggcggagcaggaccaggaggttacggacctggtggaagtggtccaggtggtgcgggtccaggtggatatggtcctggtggatccggtcctggaggtgccggacccggaggctatggtccaggcggtgctggacctggaggatatggcccaggaggagctggtccaggaggtgcaggtccaggtggagccggtccgggaggatatggacctggcggaagcggtccaggtggtcctggtagtggtggtcctggtggtgctggtggttctggtggtactactgtcatcgaggacctggatattactgtaaatggcccaggcggacctattaccattagcgaagaattgaccgtcggaggccca

SEQ ID NO: 330 - DNA, 807 bp, synthetic construct
  misc_feature 1..807: note = Description of Artificial Sequence: Synthetic polynucleotide
  source 1..807: mol_type = other DNA
ggtgcaggtggctcaggccctggtggagcaggacctggaggtgccggtcctggaggcgctggacccggcggtgttggaccgggaggagctggaggacctggtggagccggcggtccatttggaccaggtggttccggaccaggtggcgctggtggcgctggtggtccatacggccctggcggagcttatggtccaggtggccctggtggtccaggtggtcctggtggcccaggctctggtggtccttacggaccaggtggagcttacggaccgggtggagcatatggtccaggaggagcatatggaccaggcggagccggaggtccatacggaccaggtggtccttacggccccggaggaccttacggtcccggtggtgcaggtggacccggaggcgccggtggtccatacggacccggtggtgctggtccgggtggatacggtccaggaggcgcaggtccaggaggttatggaccaggcggttctggacctggaggtgcaggacccggtggatatggacccggtggatccggacctggcggagccggacctggtggatatggacctggtggtgcaggtccaggcggttacggacctggtggcgctggacctggcggtgctggtcctggaggtgctggacctggcggatatggcccaggtggttctggtcctggaggacctggttcaggaggaccgggtggagccggaggatcaggcggtacaacagtcatcgaagatttagatattaccgtcaacggcccgggcggaccaatcacaatttctgaagagttgactgtaggaggtcca

SEQ ID NO: 331 - DNA, 864 bp, synthetic construct
  misc_feature 1..864: note = Description of Artificial Sequence: Synthetic polynucleotide
  source 1..864: mol_type = other DNA
ggtgcaggtggatctggtccaggaggtgccggtccgggcggagctggtccaggcggcgcaggaccaggcggtgctggtcctggcggtgctggtcccggaggagttggacccggtggagctggtggtcctggtggagctggaggtcccttcggacctggaggaagcggaccaggaggagcaggaggtgcaggaggaccttacggaccaggtggcgcctatggacctggcggtccaggaggccctggaggacctggcggaccgggtggccctggatccggtggaccatatggcccaggtggtgcgtacggccctggtggagcatatggtcctggaggagcatatggaccaggtggtgctggtggacctggcggcgcagcaggtccctacggaccaggcggaccatatggtccaggtggtccgtacggaccaggtggtgcaggcggacctggtggtgctggaggaccatacggtcctggaggtgcgggacctggcggttatggtccaggcggtgcaggtcctggcggatatggtccaggtggatcaggaccaggaggagccggacctggaggatatggacctggtggttcaggtccaggtggagccggacctggtggatacggccctggtggtgccggacctggaggctacggacctggaggagctggcccaggaggtgccggaccgggtggagctggacctggtggttacggtccaggaggttctggtccgggtggtcctggtagtggaggaccaggtggtgccggtggaagcggtggcactacagttattgaagatctagatattaccttaaatggacctggaggtcctataacgatctccgaagagctgactgtaggaggacca

SEQ ID NO: 332 - DNA, 531 bp, synthetic construct
  misc_feature 1..531: note = Description of Artificial Sequence: Synthetic polynucleotide
  source 1..531: mol_type = other DNA
ggtgcaggtggttctggcccaggtggtgctggtccaggaggagtgggaccaggacgttcaggccctggaggtgttggaccaggaggctctggtccaggttctgttggtcctggaggatctggacaaggaggtttgggcattggtagaagtggccctggcggtgttggcccaggtggttcaggaccaggatctattggacctggaggtagcggtcagggaggtcttggtcctggtggttcaggtcagggtggtttgggcccaggaggttcaggacctggaggagttggctccggcggagttggaggaccatacggtccaggtggatctggcccaggaggagtgggtggagcaggaggaccatatggtccgggcggtagcggtggaccaggtggagctggaggaccatatggacctggtggaccttatggtcctggtggtgctggaggaccttacggccctggcggagcaggtggaccttacggaccgggtggtccatacggccctggtggtgctggcggtcctggtggagga

SEQ ID NO: 333 - DNA, 573 bp, synthetic construct
  misc_feature 1..573: note = Description of Artificial Sequence: Synthetic polynucleotide
  source 1..573: mol_type = other DNA
ggtccaggaggtgccggtggtccatatggaccgggaggaccaggtggcgcgggtcctggtggctacggtccaggaggatatggaccaggtggtgctggtccaggtggagcaggaccgggaggctatggaccaggtggagccggtcctggaggatatggtccaggaggtgcaggtcctggcggtagcggtcctggtggcataggtccaggtggatccggaccaggaggatacggtccaggtggaattggcccgggaggaactggccccggtggtgctggacctggtggtgcaggtccaggtggtgctggcccatccggtgctggtcctggtggcgctggtccatcaggtgccggaagaggtggttccggtaggggttcggttggccgaggtggcgccggcagaggtggagccggtagaggaggtgcaggaggagcaggcggatccggaggcgcaggtggctctggcggtgccggcggatctggaggaacaacaatcatcgaggaccttgatattaccgttgatggagctaatggtccaattactattagtgaagaactaactataggtggtgca

SEQ ID NO: 334 - DNA, 585 bp, synthetic construct
  misc_feature 1..585: note = Description of Artificial Sequence: Synthetic polynucleotide
  source 1..585: mol_type = other DNA
ggtgccggaggtgtaggtcccggaggttctggcccgggaggtgtaggacctggcggatcaggacctggtggtgtcggacctggaggatccggtccaggcggagttggctctggaggatcaggacctggaggtgttggacctggtggatccggtcctggcggtgtcggatccggaggtttcggtccaggtggtattggaccaggaggtagtggtcccggtggagttggtcctggaggagtcggaggaccatatggaccaggcggatcaggccctggtggagctggtggagcaggcggatcttacggtccaggcggaccatatggcccaggcggtagtggaggacccggtggtgccggtggaccatatggtccgggaggtgcaggaggcccttacggaccgggaggaccttatggtcctggaggagcaggtggtccaggtggcgagggaccgggtggcgcgggaggtccgtatggaccaggaggaccaggaggtgccggtcctggtggttatggtcctggtggtgctggtcctggaggatatggacctggaggagctggcccaggaggttacggacctggtggtgca

SEQ ID NO: 335 - DNA, 648 bp, synthetic construct
  misc_feature 1..648: note = Description of Artificial Sequence: Synthetic polynucleotide
  source 1..648: mol_type = other DNA
ggttctggaggttacggaccaggtggtgcaggtccaggaggctatggacctggtggccctggacctggtggctatggtccaggtggtgcaggccctggtggttacggaccaggaggtactggacctggtggatccgccccgggcggtgcgggcccaggtggtgctggcccaggtggatacggtcctggaggttccggtccaggtggttatggaccaggtggtggaccaggaggtgccggcccaggtggagcaggtccaggaggtgctggccctggcggagcaggtcctggaggtgccggccctggaggtgccggtcctggtggagctggtccaggaggtgccggacctggtggagccggccctggtggagctggcccaggaggagtgggaacaggtggactgggaagaggcggagctggaaggggaggagctggaagaggaggtgccggtcgaggaggtgccggacgaggaggtgcaggtcgtggtggaacaggtggagttggtggagccggtggcgctggaggagctggtggtgtcggtggagctggtggatccggaggtactaccgttattgaagatttagacataactattgatggtgccgacggtccaattacaatatctgaggagttgacaatttccggtgca

SEQ ID NO: 336 - DNA, 594 bp, synthetic construct
  misc_feature 1..594: note = Description of Artificial Sequence: Synthetic polynucleotide
  source 1..594: mol_type = other DNA
ggtgccggaggaagtggtccaggaggtgcaggtcctggaggtgtcggtccaggtggatcaggacctggaggtgttggtcctggaggttcaggccctggtggtgttggtccaggaggagcgggcggtccatataggccaggcggatctggacctggaggagcaggaggtgcaggtggtcctggcggagcatatggtccaggaggatcaggaggtcctggtggagctggtggcccgtacggccctggtggagaaggtccaggtggcagtggcggcccatacggaccgggaggagaaggaccaggtggtgctggaggcccatatggtccaggcggcgctggcggtccatacggtccaggaggagctggaggaccatatggtccaggtggagctggtggaccatatggcccaggtggtgccggtggcccttatggaccaggtggagccggtggcccatacggccctggtggtgcaggaggaccttatggacctggtggagagggtccaggtggagcaggtggtccttacggacctggaggagttggtccaggtggaaccggtccaggaggttatggtcctggcggtgccggcccagga

SEQ ID NO: 337 - DNA, 624 bp, synthetic construct
  misc_feature 1..624: note = Description of Artificial Sequence: Synthetic polynucleotide
  source 1..624: mol_type = other DNA
ggttatggacctggaggatccggtccaggaggctacggccctggtggttctggtcctggtggttttggaccgggtggatctggaccaggtggatacggacctggtggaagtggaccaggaggatacggtccgggaggttctggacctggtggtgctggacctggtggttacggacctggaggaaccggtcctggaggatcaggacctggtggatacggtccaggaggtagcggacctggtggatatggtcctggtggtagtggaccaggtggttatggccctggaggatcgggcccgggtggtgccggtccaggtggcgctggaccaggtggagccggacctggtggagctggaccaggaggagttggtccaggtggtgcaggtcctggaggatctggacctggcggagctggtccaggaggagcaggaagaggtggagcaggccgtggaggcgcaggtcctggaggtgctggacccggtggagctggtggagcgggtggagccggaggatccggtggagcaggcggaagcggaggaactaccgttatagaggacctggatataactattgatggagctgacggacctatcacaatctcagaagagttgactattaatggcgca

SEQ ID NO: 338 - DNA, 549 bp, synthetic construct
  misc_feature 1..549: note = Description of Artificial Sequence: Synthetic polynucleotide
  source 1..549: mol_type = other DNA
ggtgctggtggttctggaccaggaggcgccggccctggtggtgtaggccctggtggatcgggaccaggtggagtaggaccaggtggaagtggaccaggcggagtgggaccaggtggagctggaggtccttatggacctggaggctctggacctggcggagctggtggtgctggcggccctggaggagcatacggtccaggcggttcgggtggtccaggaggagctggcggaccttatggtccgggaggcgaaggaccaggtggtgctggtggaccatacggtcctggaggtgaaggtcctggaggtgctggaggtccatacggtcctggtggtgcaggaggaccatatggtcctggaggtgccggtggcccttacggccctggaggtgcaggcggtccatacggtccaggtggcgctggaggtccatatggcccaggaggtgttggaccgggaggaactggtccgggtggctacggacctggcggtgctggtccaggcggttatggtcctggaggatcaggtcctggaggttacggtccaggaggatca

SEQ ID NO: 339 - DNA, 603 bp, synthetic construct
  misc_feature 1..603: note = Description of Artificial Sequence: Synthetic polynucleotide
  source 1..603: mol_type = other DNA
ggtcctggtggatatggacctggcggttcaggaccaggaggatttggaccaggtggttctggtcctggaggatctggtccaggtggctcgggtcctggaggatatggtcctggaggttctggtccaggtggatacggtcccggtggttctggcccaggtggttacggaccaggcggatctggtccaggaggctatggtccaggtggatccggaccaggaggaagtggccctggaggatacggtccaggtggaagcggaccaggtggttatggacctggtggatccggacctggaggagcgggacctggaggtgctggcccaggtggagtcggtccaggaggtgcaggtcctggcggagccggtcctggtggagttggtcccggtggcgctggtcctggtggtgctggaccaggtggtgcaggacctggtggagctggccgtggtggtgccggaccaggcggtgctggtggtgccggtggagctggtggatctggtggagctggtggtagtggtggaactacagtaattgaggatttggatataaccatcgacggtgctgatggaccgattactattagcgaagaacttaccatcggtggtgca

SEQ ID NO: 340 - DNA, 624 bp, synthetic construct
  misc_feature 1..624: note = Description of Artificial Sequence: Synthetic polynucleotide
  source 1..624: mol_type = other DNA
ggtatcaatgtcgattccgacataggttctgtaacctcgctcatactgtcaggtagcactctacaaatgactataccagccggtggtgatgatcttagcggaggttaccctggaggattcccagctggagcacaaccgagtggtggcgctcctgttgatttcggcggaccatcagctggcggtgacgttgctgcaaagctggctagatctttggcatctacattggcctcatcaggtgttttcagagcagcgtttaattccagagtatcaacacctgttgctgttcagtttacagatgccctagtgcagaaaatcgcctccaatcttggactggattacgctacggctagtaagctgcgaaaggcatcccaggctgtctccaaggtcagaatgggaagtgacactaacgcctacgccctggctatttcttcagctttagctgaagtattgtcctcatccggaaaagtcgcagacgctaatattaatcagattgctcctcagctagcctcaggtatcgttttaggagtttctactacggccccacagtttggagtagacttgagctcaattaatgttaatctcgacatttccaatgttgctcgcaatatgcaagccagcatacaa

SEQ ID NO: 341 - DNA, 504 bp, synthetic construct
  misc_feature 1..504: note = Description of Artificial Sequence: Synthetic polynucleotide
  source 1..504: mol_type = other DNA
ggtggtccagccccaattaccgctgaaggcccagatttcggtgcaggatatccaggaggagctcctacagatttgagtggattggatatgggtgctccctccgatggctctcgcggaggagatgctaccgccaaactattgcaagctctagttccagcactgcttaaatccgatgtgtttagagcaatctacaagagaggcactagaaaacaagtcgtacagtatgtcactaattctgctctccaacaagccgcctcttcacttggtctggatgcatcaacaatatctcagctacagacaaaggctactcaagctttgtctagtgtgagcgctgattctgactctaccgcatacgctaaggcctttggtttggcaattgctcaagtgttgggaacctctggacaagtaaacgatgcaaatgttaaccagattggtgccaagttagccactggtattctcagaggatcttccgctgtcgcccccagactgggtattgacctgtca

SEQ ID NO: 342 - DNA, 624 bp, synthetic construct
  misc_feature 1..624: note = Description of Artificial Sequence: Synthetic polynucleotide
  source 1..624: mol_type = other DNA
ggtatcaacgtcgattcagatataggatccgtaacatctcttatcttaagtggttctactttgcaaatgaccattccggcaggaggagatgacctgagcggtggatatcctggtggatttccagcaggagctcagccatctggtggtgctccagtagattttggaggaccatcggcgggtggtgacgtcgctgcaaaacttgcccgttctctcgcttcgaccctggcctccagtggagtatttcgtgctgctttcaacagcagagtttcaactccagttgcagtgcaactgaccgatgcgttggtccaaaagatcgcctcaaatcttggcttggattacgctactgcatcgaagctccgtaaggcatctcaggctgtttctaaggtccgcatgggatcagatactaacgcatacgctttggctatctcatcagcattggcagaggttttgagttcctcaggtaaagtcgctgacgccaacattaatcagatcgctccgcaacttgcttctggaatcgtcttaggcgtttcgaccacagcacctcaatttggagttgatttaagttctataaacgtgaacttggatatttccaatgtcgctaggaacatgcaagccagcatacaa

SEQ ID NO: 343 - DNA, 504 bp, synthetic construct
  misc_feature 1..504: note = Description of Artificial Sequence: Synthetic polynucleotide
  source 1..504: mol_type = other DNA
ggtggacctgctccaatcaccgctgagggtccagactttggagctggatacccaggtggcgcccctactgaccttagtggattggacatgggtgccccttcagatggatcgcgcggtggtgatgcaaccgctaaattgcttcaagctttagtgcccgcacttctaaaatccgatgtattcagagcaatatataagagaggaacgagaaaacaagtagttcaatacgttacgaactcggcgttacaacaagctgctagttctttaggtttggatgcctccacgatttcccagttgcaaactaaggccacccaagccttatcttcggttagcgctgactccgattctactgcctatgccaaagcttttggactggccattgctcaggtactaggaacttcaggtcaggttaatgacgctaacgtgaatcaaatcggagcaaaactcgcaactggtattttgcgtggatcatctgctgttgctcctagattgggaatcgacctatca

SEQ ID NO: 344 - DNA, 624 bp, synthetic construct
  misc_feature 1..624: note = Description of Artificial Sequence: Synthetic polynucleotide
  source 1..624: mol_type = other DNA
ggtatcaacgttgattccgatattggaagtgtgactagtctgattttgtccggctccacattgcaaatgaccattccagccggtggtgacgacctgagcggaggttacccaggcggattgcctagcggcgctcaaccaagtggtggtgctcctgtggattttggtggaccatctgcaggtggagatgtcgcggcgaaactggcgagatcattggctagcactttggcctctagtggtgtttttagggcagctttcaactcccgtgttagcacacctgttgctgtccaactaacagatgcactggtgcagaagatcgcaagtaatttaggacttgattacgccaccgcctcaaaattgagaaaagcatctcaggctgtatctaaggtgcgcatgggttctgacacaaatgcatacgcactggctatttcttcagccttggctgaagtgctatcaagttccggaaaggtcgcagacgccaatattaaccaaattgcaccgcagctagcatctggaatcgttttgggtgtcagtaccactgcaccccaatttggtgttgacctatcttcaattaatgttaacctggacatctctaacgtggctcgcaatatgcaggcatccattcaa

SEQ ID NO: 345 - DNA, 504 bp, synthetic construct
  misc_feature 1..504: note = Description of Artificial Sequence: Synthetic polynucleotide
  source 1..504: mol_type = other DNA
ggtggtccagcacctattaccgctgagggtcctgactttggtgcaggatatcccggtggcgcacctactgacttaagcggactcgatatgggagctccatctgatggatccagaggaggtgacgccacagccaagctattacaggccctcgtaccagcgcttctaaagtctgatgtttttagagccatatacaagagaggaactcgtaagcaagttgtgcagtacgtaactaactcggctcttcaacaagcagcgtcgtcgctaggtctagacgccagtaccatttctcagttgcagactaaagccacgcaagctttgtcatcagtatcagctgattcagactctaccgcttatgctaaggcttttggactggcaatcgctcaagttttgggtacctcaggccaagtgaacgacgctaacgttaatcagataggtgctaaattggcaactggcatattaagaggtagcagcgctgtcgcgcctaggctgggcattgacttgtca

SEQ ID NO: 346 - DNA, 624 bp, synthetic construct
  misc_feature 1..624: note = Description of Artificial Sequence: Synthetic polynucleotide
  source 1..624: mol_type = other DNA
ggtatcaacgtcgacagtgatattggaagtgtaacgagcttgatcttgagcggtagtaccttacaaatgactatccctgccggtggtgacgacctcagcggtggctacccaggaggattcccagctggagctcagccttcaggaggtgctccagtcgattttggaggaccatctgctggaggtgacgtcgctgctaaattggccagatctctggcctcaactctggcatcgtctggagtatttagagcagcatttaattccagagtatccacacctgttgctgtacaactgacagatgctctcgtccaaaagattgctagcaatcttggactagactatgctactgcctcaaagttgagaaaggcgagtcaagctgtcagcaaagttagaatgggttctgatactaatgcctatgcactagcgatcagctccgcattagccgaggttttgtcatcttcgggtaaggtcgccgatgcaaacattaaccaaatcgctccacaattagcttctggaattgtgctaggagtcagtaccacagctcctcaattcggcgtggatttatcatctattaatgttaaccttgatatatcgaatgtcgcgaggaacatgcaagccagcattcaa

SEQ ID NO: 347 - DNA, 504 bp, synthetic construct
  misc_feature 1..504: note = Description of Artificial Sequence: Synthetic polynucleotide
  source 1..504: mol_type = other DNA
ggtggtccagcaccgattacagctgaaggacctgatttcggtgctggatacccaggaggagctccaaccgatctaagcggcctcgacatgggagccccatctgacggttctagaggtggagacgctacagccaaactattgcaggctctcgttcctgccttactaaagtctgacgtttttagagcgatatataagagaggtacacggaagcaagtggtgcaatacgttaccaactccgctttgcagcaggctgcttcttcgttgggtttagacgcatccactatttcacaattgcagacgaaggcaacacaggccctttcctctgtcagtgccgattcggatagcaccgcctacgcaaaggctttcggtttggctattgctcaggtgctaggtacttctggacaagtcaacgacgctaatgtgaatcagattggagctaaattggctaccggtattcttagaggatcttctgccgtagcccctagattgggcatagacctttca

SEQ ID NO: 348 - DNA, 624 bp, synthetic construct
  misc_feature 1..624: note = Description of Artificial Sequence: Synthetic polynucleotide
  source 1..624: mol_type = other DNA
ggtattaacgtcgattcagacatcggttctgtgacaagtttaatattgtctggttccactttgcaaatgaccataccagctggcggtgacgatctgagtggcggctaccctggcggattcccatctggtgctcaaccttccggaggagctcctgttgattttggaggtccatctgctggtggtgatgttgcagctaaattagcacgatctctagcatctacgttggcatcgtccggcgtatttagggcggcttttaactctagagtgtcaacacctgttgctgtacaattaaccgatgctctcgtgcagaagatcgccagtaacctgggtttggactatgcaactgcttcgaaactaagaaaggcttctcaagcggttagcaaggtccgcatgggctccgacaccaacgcctatgcattggcgatatcaagtgcactcgctgaggttttgttgagctctggaaaggtagcagacgccaacattaaccagatcgctcctcaactcgcctcaggcatagttttaggtgtttctactgcagcaccacagtttggcgttgacttatcaagcattaatgtgaacctggatatctctaacgtggccagaaacatgcaagcaagcatacaa

SEQ ID NO: 349 - DNA, 504 bp, synthetic construct
  misc_feature 1..504: note = Description of Artificial Sequence: Synthetic polynucleotide
  source 1..504: mol_type = other DNA
ggtggacctgccccaataacggctgaaggacctgattttggtgctggttaccctggcggtgcacctactgatctgtcaggactggacatgggtgccccatccgacggcagtaggggaggcgacgctacagctaaactattgcaggctctggtgccggcgctgttgaagagtgacgtttttagagctatttataaaagaggtacacgaaaacaagtcgtgcagtatgtcactaattctgctttacaacaggccgcatcttccttgggcctggacgcttctactatatcccagttgcaaacaaaagcaacccaagcattgtcctccgtttctgctgattccgactctacagcatatgctaaagcatttggtttggcaattgcccaagttctgggtactagcggtcaggtaaatgatgctaacgtaaatcagatcggagcaaaacttgccaccggtatattgagaggttcctcagctgttgcccctagactaggaattgatttgtca

SEQ ID NO: 350 - DNA, 645 bp, synthetic construct
  misc_feature 1..645: note = Description of Artificial Sequence: Synthetic polynucleotide
  source 1..645: mol_type = other DNA
ggttcttccgccggacttgtaagcagagtcgcaaatgcattggctaacaccagtacattacgcgctgttctgcgaaggggtgtaagtcaacagactgcttcctccgtcgtgcagagagccgttcaatcccttgccggaacgctaggagttgatggaaattccttgtccagaattgccctgcaagcaattagtcaattgcctggtggtagtgatacttctgcatacgcccaggctttctcatctgctttattcaacgcaggtgtattgaacgcttcaaacatagacactttgggttcgagggttttgtctgccgttctgaacggtgtctcttctgccgcccaaggtattggactcaacgttgatacaggttctgtacaaagcgacatttcttctagttcatcttttttatcaagtagtagttcgtcggcaagtttcagccaaacctccgcttcgagcacctctggtgccggttatacagccccagctggaccgtctggatacactggtccttccggaccatccggatacacgggtccggtaggaggtgctgctcaatttggatctgtttcaggtcaaacatctttcggacaaacatcaggatttactgcaagtaccggcggacaggctgctttcggtgcaacctca

SEQ ID NO: 351 - DNA, 645 bp, synthetic construct
  misc_feature 1..645: note = Description of Artificial Sequence: Synthetic polynucleotide
  source 1..645: mol_type = other DNA
ggttctagtgccggattggtcagtagagtcgctaatgcattagctaatacaagtacattgagagcggtcttgcgaagaggcgtatctcaacagacagcctcctccgtggtccagagagctgtccaatctcttgcaggcacgttgggagttgacggaaacagtctttcaagaattgctttgcaagctattagtcaattgccagctggtagtgacacttcagcatatgctcaagcgttcagttccgcattagttaatgctggtgttttgaacgcctctaacattgacacattgggttcacgcgtcctaagtgcagtgcttaacggcgtttcatccgctgcgcaaggaataggattaaacgtcgataccggcagtgtccagtctgatatctcaagttctagctcttttttgtccagttcgtcgtccagtgcttctttttcacagaccagcgccagtagcactagcggcgctggttatactggacctagtggaccttcaggatatacaggtccagccggtccatccggatataccggtcctgttggcggtgctgctcagttcggttcggtaagtggacagacttctttcggacaaacctctggttttacagcttctacgggaggacaggccgccttcggtgctacttca

SEQ ID NO: 352 - DNA, 645 bp, synthetic construct
  misc_feature 1..645: note = Description of Artificial Sequence: Synthetic polynucleotide
  source 1..645: mol_type = other DNA
ggttcttcagctggattggtgtctagagttgccaacgcattggcaaacacatctacactcagggctgtcctgagacgtggagtgtccccacaaacagcctcatccgttgttcaacgtgcagttcagtctttggcaggtacactgggtgtcgatggaaattcgctctctagaattgccctccaagccatctcccaactgccagctggttctgacacgtctgcatacgcccaggccttttccagtgctttggtaaatgccggagtgctctccgcctctaatattgataccttgggttcaagagttttaagtgctgtcttgaacggagtctcctcagctgcccaaggtataggcttgaacgtcgatacaggatccgttcaatctgacatcagttctagtagctcatttctatcatcttcatctagctcttcctcaatttcccaaacttctgcatcttcgacatcaggtgcgggttataccggtcccgcaggtccaagtggatacacaggaccatcgggtccgtcaggatatacgggacctgtgggaggtgcggcacagtttggctcagtatctggtcaaacgagcttcggtcagacaagcggattcaccgcctcaaccggtggacaggctgcctttggtgcgacctca

SEQ ID NO: 353 - DNA, 645 bp, synthetic construct
  misc_feature 1..645: note = Description of Artificial Sequence: Synthetic polynucleotide
  source 1..645: mol_type = other DNA
ggttcttctgcaggacttgtttcccgagttgctaatgccctggctaacacatccactttaagggctgtgctgagaagaggagtctcgcaacaaacagcctcaagcgtcgtccaaagagccgttcagtccttggccggaactctgggtgttgatggtaactctcttagccgtatcgctttacaagctatctctcaattgccagcaggatccgatacctccgcttacgcccaggccttctcttcggctctggttaacgccggcgttttgaatgctagtaacattgatacgttgggtagcagagttttgagcgctgtactgaacggtgtaagcagtgccgcccagggaattggactcaacgtcgactcaggctcgattcagagcgacatttcatcatcctctagctttttgtcatcatcgagttcctcgtcctcaatttcccaaacatctgcatcaagtacatccggtgcaggatatactggacctgctggtccgtcaggctacacaggcccatctggtccatcaggttacacaggacccgtaggtggagccgctcagtttggatcggtgtcaggtcagacatcttttggtcaaacttctggatttaccgctagtactggcggacaagcggcctttggagctacgtca

SEQ ID NO: 354 - DNA, 609 bp, synthetic construct
  misc_feature 1..609: note = Description of Artificial Sequence: Synthetic polynucleotide
  source 1..609: mol_type = other DNA
ggtggaggtgtcggaagcctcaccggtcagacttcttttggccagactagcggcttcacgagtactgcgggagcacaaggcggtttcggcccaacaaccggcgcccaaagtgcattgatttctaggattgcaaacgccttggcaaatacttcaacgttaaggtccgtactacgtaccggcgtctctcagcaaaccgcctcaagtgtggttcagcgaactattcaaactcttgcttccaatttgggtatagatggcaataatctatcaaggatagcactgcaagctatttcgcaagtaccagcaggttctgatacatcagcctatgctcaagcgttctcaactgctttagtcactggaggagtgttaaacgcaaacaacgtcgataccctaggtagtcaagttctaagtgctgtgctcaacggagtttcatcggccgctcaaggactgggaataaatgtggacaccggatctgtacagagtgacattagatcatcatcctcttctttgtccacatcttcttcctctgcatctttcagtcaaacttccggagccgcttctaccactggttttactggcgctggtggatacccaggaggagctggaccatta

SEQ ID NO: 355 - DNA, 609 bp, synthetic construct
  misc_feature 1..609: note = Description of Artificial Sequence: Synthetic polynucleotide
  source 1..609: mol_type = other DNA
ggtggaggtgttggatctcttacaggacaaacgagtttcggtcaaacctctggcttcacaagtaccgctggagctcaaggaggattcggtccgactacaggtgctcagtccgcattgatcagtcgaatcgccaatgcattggccaatacctctaccttgagatctgtcttgagaactggtgtaagtcaacagacagcatctagtgttgttcagcgagctattcaaacgctagccagtaatttaggtatagatggcaataacttgagtaggattgccctgcaagcaatatcccaagtaccagcaggttctgacacctccgcttatgcacaggctttcagtacagctctggtgactggcggcgttttaaacgccaacaacgttgatactttgggatcacaagtgctgtccgccgtgttaaacggagtttcatcggcagcacagggtcttggtatcaacgtggacactggtagcgttcaatcagatatccgatcatcaagttccagtctgtctacatcttcctcgtcggctagtttctctcagacttcaggtgctgcttctaccacaggttttaccggtgctggtggttaccctggaggtgcaggtcctcta

SEQ ID NO: 356 - DNA, 609 bp, synthetic construct
  misc_feature 1..609: note = Description of Artificial Sequence: Synthetic polynucleotide
  source 1..609: mol_type = other DNA
ggtggaggcgtaggatcattgaccggccaaacaagctttggtcaaacttctggtttcacatcaactgctggtgctcaaggtggcttcggaccaacgacaggagctcaaagcgccttgatctccagaatagctaacgcactggctaacacatctactcttagatccgtcttgcgcacaggagtaagccaacagacagcatcaagtgtagtacagagaacgatccaaacgttggcatcgaacttgggaattgacggcaacaacctctcaagaatcgcattacaggctatatcacaagttccagctggctctgatacctcagcttatgctcaagcatttagtaccgcattagtcacaggcggagttcttaatgcaaataacgtggataccttgggttcccaggtgttgtcagctgtcttgaatggtgtgagctctgccgctcagggacttggtattaatgttgacacaggatccgttcaatccgacattagatcttcttcgtctagtctgtccacatcatcgtcatctgcctctttctcccagacatctggtgcagcttcgacaaccggatttaccggagctggtggttaccctggaggcgctggtccacta

SEQ ID NO: 357 - DNA, 609 bp, synthetic construct
  misc_feature 1..609: note = Description of Artificial Sequence: Synthetic polynucleotide
  source 1..609: mol_type = other DNA
ggtggtggagtaggaagcttgaccggtcaaacttcctttggtcagacgtccggattcactagcactgccggagcccaaggaggattcggcccaacgacaggagctcaatctgcacttatatcgagaattgctaacgcccttgccaatacttcaaccttgaggagtgtgctgagaacgggtgtttcccaacaaaccgcatcctcagtcgtgcaaagagctatccagactcttgcatccaatttgggattggatggcaacaacctctctagaatcgctcttcaagccatttcacaggtaccagcaggcttcgatgcttctgcttatgcacaagctttctcgacggcattagttacaggtggagtgctaaacgctaataatgtagatacactcggctctcaagttttatcggctgttttaaacggtgtctcatctgctgctcagggtttgggtattaacgttgatactggatcagtccaaagcgatataagatctagtagctcgagtttgtctaccagtagtagtagcgcatctttcagccagacttcaggtgctgcttctacaacaggttttaccggagctggtggttaccctggaggagcaggaccacta

SEQ ID NO: 358 - DNA, 609 bp, synthetic construct
  misc_feature 1..609: note = Description of Artificial Sequence: Synthetic polynucleotide
  source 1..609: mol_type = other DNA
ggtggaggagttggttctcttacaggtcagacttcctttggacaaacttcaggttttaccagcaccgcaggagctcaaggtggttttggaccaaccacgggcgcacaatctgccctgatttcaagaattgctaacgcattggctaacacatccactctgagatccgtgctgagaaccggagtttctcaacaaacagcttcatccgttgtccaaaggactattcaaactctcgcatcaaacttgggaattgatggaaataatttgtcgcgtatagccttgcaagcaattagtcaagtgcctgccggttcagatactagtgcatacgctcaggccttttcaacggctttggtcacaggaggagtcttaaacgcaaacaatgtggatacactaggatctcaagttttgagtgccgttttatccggagtatcctcggccgcccaaggcttaggaatcaacgttgatactggcagtgtccagtccgacattagatccagctcatcaagtttaagcacatcaagctcttccgcctccttcagtcaaacttctggagccgcatcaactacgggattcactggtgccggaggatacccgggtggtgctggtccacta

SEQ ID NO: 359 - DNA, 609 bp, synthetic construct
  misc_feature 1..609: note = Description of Artificial Sequence: Synthetic polynucleotide
  source 1..609: mol_type = other DNA
ggtggaggagtgggctccctaactggacacacatctttcggacagacctctggattcacctcaactgctggcgcccaaggaggatttggacctacaactggtgctcaatctgctttgatctcaagaattgctaatgccttggcaaatacttcaactctgagatctgtactgcgtaccggagtttcacaacagattgcctcatcggtagtccaaagaactattcaaactcttgcctctaacttaggtattgatggtaacaacttgtcgcgtatcgcactacaagcaatatcacaggttccagctggaagtgacaccagtgcttatgctcaggcttttagcacagccttagtgacgggcggtgttctaaacgctaacaatgttgacactttaggtagtcaagtgttgagtgctgttttgaacggcgtctcctcagcagcacaaggtttgggaattaacgtggacactggctcagtgcaatcagacataagaagttcatcatcctctttgagcacttcctcatcatcagcaagtttctcacaaacaagtggagctgcctctacaacaggatttacaggtgctggtggctacccgggtggagccggaccatta

SEQ ID NO: 360 - DNA, 609 bp, synthetic construct
  misc_feature 1..609: note = Description of Artificial Sequence: Synthetic polynucleotide
  source 1..609: mol_type = other DNA
ggtggcggagtaggttctctaacaggccaaacatcgtttggccagacttctggttttacatcaacagccggtgcccaaggtggcttcggacctatcacaggcgcccaatctgccctgatatcccgtatcgcgaacgctttggctaataccagtacattacgatccgtgttgcgaacaggtgtttcccaacagactgcttcgtcagtagtgcaacgtacgatacagacacttgcatccaacctcggtattgacggaaataacctgagtagaatagctttgcaggccatcagtcaggtgccagcaggtagcgacacctccgcttacgcacaagcctttagcactgctttggttactggaggtgttcttaatgccaataatgtcgataccctgggttctcaagtactttccgcagtattgaatggagtatcttctgcggctcaaggtttgggtatcaacgtggatacgggatcagttcaaagcgatattcgaagctcctcttcttctctttccaccagttctagtagcgcttcgttttcacaaacatccggcgctgcatccactaccggtttcacaggtgctggaggttatccaggtggagcaggaccatta

SEQ ID NO: 361 - DNA, 609 bp, synthetic construct
  misc_feature 1..609: note = Description of Artificial Sequence: Synthetic polynucleotide
  source 1..609: mol_type = other DNA
ggtggtggtgtcggttcgcttaccggccaaacaagttttggccaaacctctggatttacctccacagcgggtgctcagggaggattcggacctactactggtgcccaatcagctctgatttctagaatcgcaaacgcattggcaaacacatctactttaagatcggtattgcgaactggagtctctcaacaaacggccagctctgttgttcaaagaacgatccaaaccttggctagcaacttgggtatcgatggtaacaacctatcgagaattgctctgcaggccatttcccaagtgccagccggatctgatacttcagcttacgctcaagctttttctacggcacttgttactggaggtgttttgaacgctaacaacgtggacaccctaggatcccaggtcctgtcggcagttctaaacggtgtatcctccgctgcacagggattgggaataaatgttgatactggctcggtacagagtgatatcagaagcagttcgtctagcttaagtacttcttcctccagcgcaagctttagtcagacttctggtgctgcatctacgaccggtttcaccggagctggcggctacccaggaggtgccggtccatta

SEQ ID NO: 362 - DNA, 600 bp, synthetic construct
  misc_feature 1..600: note = Description of Artificial Sequence: Synthetic polynucleotide
  source 1..600: mol_type = other DNA
ggtgcaggttacacgggaccatccggcccatcgactggtccatccggttacccaggtcctctaggtggtggagctccatttggacaaagtggcttcggaggtagtgatggtcctcaaggcggttttggtgccaccggtggtgctagcgctggtttaatctcacgagttgctaacgctttggccaacacttccacactaagaactgtacttagaactggagtgtctcaacagatagcaagtagtgttgtccagagagcagcacaatctcttgctagtactttaggcgttgacggcaataatctcgccagattcgcagttcaagcagtttccagattgcccgctggatctgatacttcagcatacgcacaggcattcagtagcgccctgtttaatgccggtgtgttgaatgccagtaacatcgacaccctaggtagtagagtcctgtccgctttactaaacggtgtaagctcagctgctcaaggtttgggcatcaacgtggattctggttctgttcaaagtgatatttcgtcatcttcaagtttcttgtctaccagcagctcctcggcttcttactctcaagctagtgccagttctacttca

SEQ ID NO: 363 - DNA, 600 bp, synthetic construct
  misc_feature 1..600: note = Description of Artificial Sequence: Synthetic polynucleotide
  source 1..600: mol_type = other DNA
ggtgcaggttacaccggtccatcaggccctagtactggtccgtccggatatccaggtttgctgggtggaggagctccatttggacaatccggatttggtggaagtgacggtccccagggtggattcggtgctacaggaggagcctcagcaggtttgatttctagagtagcgaacgcattagccaatacctcaactctgagaacggttctaagaactggtgtttcccaacaaatagcttcaagcgtcgtgcaaagggccgcacaaagtcttgctagtaccttgggagtcgacggaaacaaccttgccagattcgctgttcaagctgtttccagactacctgccggttccgatacaagtgcctatgctcaagcttttagttctgcattatttaacgcaggagttttaaacgcctccaatattgataccctcggtagtagagtattaagtgcactgctaaacggtgtcagttccgccgcccaaggtttgggcatcaatgtggactctggatctgttcaatctgacatctcttcatcatcatcttttttgtctacatcttcctcatccgcttcttattctcaggctagcgcatcaagtacctca

SEQ ID NO: 364 - DNA, 600 bp, synthetic construct
  misc_feature 1..600: note = Description of Artificial Sequence: Synthetic polynucleotide
  source 1..600: mol_type = other DNA
ggtgctggatacacgggcccttcaggtccctctacaggacctagcggttacccaggaccactgggaggtggagctccatttggccagtccggtttcggtggcagtgacggcccccaaggcggattcggagctacaggcggtgcttccgctggtctgatatcccgtgtcgcgaacgctctggcaaacactagtacgttgagaacagttttgcgtactggcgtttcccagcagattgcttccagtgttgtacaacgagcagcccaaagtttagcttccaccttaggagtggatggtaataacctagctcgctttgcggtacaagcagttagccgccttccagcaggttccgacacgtcagcttatgcacaggctttctcatcagccctatttaatgctggagttttgaacgctagtaacatagatacattgggatcgagagtattgagtgctttattgaacggagtatcttcggctgcccaaggtctgggtataaatgtagactccggatcagtacaatcggacatctcttcgtctagtagttttctttctacaagctcttcctccgcttcttattcccaggcttctgcgagttctacttca

SEQ ID NO: 365 - DNA, 600 bp, synthetic construct
  misc_feature 1..600: note = Description of Artificial Sequence: Synthetic polynucleotide
  source 1..600: mol_type = other DNA
ggtgctggttatactggtccatctggaccttcgacgggtccttctggttaccctggaccactgggaggcggtgcccctttcggacaatccggattcggtggaagtgccggtccacagggtggttttggtgcaaccggtggtgcttctgctggtttaatatcgagagttgccaacgctctggccaacacaagtactttacgaaccgtcctgcgaactggcgtatcccaacagatagcctcttcagtcgtacaacgtgccgctcaatccttggcttcgaccttgggagtggacggtaacaatcttgctagatttgctgttcaagctgtcagtagacttcctgctggaagtgataccagtgcttatgcacaagcattcagtagtgctttgtttaacgctggagtcttgaatgcctcaaacattgatactcttggttcacgtgttctatctgctttattaaacggtgtgagctcagccgcacaaggattaggaataaacgttgattccggaagcgtgcagtcagacatttcctctagctcaagctttttgagtactagtagctcttcagccagttactcccaagcctcagcatcctcaacttca

SEQ ID NO: 366 - DNA, 600 bp, synthetic construct
  misc_feature 1..600: note = Description of Artificial Sequence: Synthetic polynucleotide
  source 1..600: mol_type = other DNA
ggtgcgggttatactggcccgtcaggtcctagtactggaccatctggttatccaggtccattaggaggtggtgctccatttggacaatctggtttcggaggttcagctggaccacaaggaggctttggtgcaactggaggtgcatccgccggattgatttcaagggtagcaaatgctttggcgaacacctccactcttagaacggttctccgaacaggtgttagtcagcaaatcgctagttccgtggtccaaagagccgcccagagtttggcatcaactttgggagttgatggaaataatttggcgagatttgccgttcaagctgtgtctagactaccggcaggaagcgatacttctgcgtacgcccaagccttctcatccgctttgttcaacgctggagtgttgaatgctagtaacatcgataccctgggcagtagggtcttgtcagcactgctcaatggtgtgtcgagtgctgcccaaggattgggtatcaatgtcgacagtggttcagtccaatccgatatctcttcgtcatcttcatttctaagtacgagctcttcctcagcttcatactcccaagcttcagcttcttccacctca

SEQ ID NO: 367 - DNA, 600 bp, synthetic construct
  misc_feature 1..600: note = Description of Artificial Sequence: Synthetic polynucleotide
  source 1..600: mol_type = other DNA
ggtactggttacactggacctagtggtccttcaactggaccatcaggatatccaggaccactgggtggtggtgctccctttggacaatctggatttggaggctcagctggacctcaaggcggtttcggtgctactggtggagctagcgctggtttgatttccagagttgccaacgcactggcaaatacatccacattgagaactgtactcaggaccggtgtcagccaacagatcgcttcttcagtcgttcaaagggctgcccaatcattggcaagcactctgggcgttgatggtaacaatttagctagattcgcagtccaagctgtgtccaggctgccagctggttcagatacctccgcatatgcgcaggcattcagtagcgctctgtttaatgcaggagtattgaatgcttcaaatattgatactctcggtagcagagtcttatccgcattactcaatggagtatcatccgccgcgcaaggtttaggaataaatgtcgattccggttctgttcagtccgacatctcatcttcatcatcgttcctcagtacttcctcctcttcagcgagttactcccaggccagcgcctcttctacgtca

SEQ ID NO: 368 - DNA, 600 bp, synthetic construct
  misc_feature 1..600: note = Description of Artificial Sequence: Synthetic polynucleotide
  source 1..600: mol_type = other DNA
ggtgcaggatataccggaccttccggaccatcaacgggtcctagtggttatccaggacctctaggaggtggcgccccttttggtcagagtggttttggtggttcagcaggaccccagggaggattcggagctactggtggtgcatcagctggtttgattagcagagtagcaaacgccctagcaaatacatcgactctaagaacagttttgagaacaggtgtctctcaacaaattgcttcctccgtcgttcaacgtgcagctcagtcattggcatctactttaggtgtggatggaaataatttggctagattcgccgtccaagctgtgtctcggctaccagccggctcggacacttcagcttacgcccaggctttctcatccgcactgttcaatgctggagtactaaacgcttcgaacatagatacgctcggatctagagttctaagcgccttgctgaatggtgtcagctccgcagcccaaggacttggaataaacgttgactcaggaagcgttcagtcggacatcagtagtagctcatcattcctgtccacctctagctcgtccgctagctacagtcaagccagtgcctcctccacttca

SEQ ID NO: 369 - DNA, 600 bp, synthetic construct
  misc_feature 1..600: note = Description of Artificial Sequence: Synthetic polynucleotide
  source 1..600: mol_type = other DNA
ggtgcgggttacaccggaccgtcaggtcctagtactggcccgtccggttacccaggaccattaggcggtggcgcaccttttggtcagtcaggttttggaggctctgatggtcctcaaggaggattcggcgccacaggtggagcctctgctggactaatctcccgtgtggccaacgctctagcgaacacatccactttgaggactgtgctaagaaccggagtatcccagcaaatcgcatctagcgttgtgcagagggccgcacaatcactagcatctactttgggtgtagatggaaataatctggctagattcgccgttcaggccgttagcagactcccagccggttcagatacttctgcttatgctcaagcgttctcatccgccttgttcaacgccggcgttctaaacgcctctaacattgataccttaggttcaagagtcctaagtgccttacttaacggagtttcttccgctgcccaaggacttggtatcaacgtcgattctggttcggttcaaagcgatatttcaagctcctcttccttcttgtcaacttccagctcatctgctagctacagccaagcttcggcaagcagtacatca

SEQ ID NO: 370 - DNA, 567 bp, synthetic construct
  misc_feature 1..567: note = Description of Artificial Sequence: Synthetic polynucleotide
  source 1..567: mol_type = other DNA
ggtttcaccggagcaagctatcccggtccacaagtctcacagcctgcacctttcggcgtcggcccacaaccaggaggtgctctacctggttttggacaagtatctggagctcaaagtgcccttatttctagaatcgccaacgctttgggtaacaccgctactatgcgagctgtcttgcgcagcggagtgagtcaacaaattgtctcaaatgttgttcaaggagctgtgcaggcattatcatccagtctgggaattgatggtaataacttggcaaggattgcttctcagaccatactcagagtacctgctggttcggacactagcgcatacgctcaagcattttctactgccctgttcaattcgggtgttttgaacgctagtaatgtgaacacattgggctcccaggtggtatcgacgttgctgcgtggcatctcatcaacggcacaaggtcttggattaaacgtcgacgcaggttccgttcaatccgatataagttctagtagttcctttctgtctacttcctcgtcctccacctcatcttcacaaacaactgcagcaagtacgtca

SEQ ID NO: 371 - DNA, 567 bp, synthetic construct
  misc_feature 1..567: note = Description of Artificial Sequence: Synthetic polynucleotide
  source 1..567: mol_type = other DNA
ggtttcactggagcttcatatccaggaccacaggtgtcacagcctgcacctttcggtgttggtccacaaccaggtggtgcgttaccaggttttggccaagtttctggtgcacaatctgcacttatttcgagaattgcaaatgctctcggaaataccgctaccatgagagcagtgctgagaagcggtgtctcacaacaaatagtctctaacgtagttcagggagctgtacaagctttgtcctcatcacttggaattgatggaaataacctggcacgaatcgcttcgcagactatattacgagtgccagccggaagtgatacttcagcttacgctcaggctttctctactgccttgttcaattcaggagtattgaacgcgtcgaatgttaatacccttggttcgcaagttgtttccacactgctacgaggtatttctaacactgcacagggtctaggactgaatgtagacgctggtagtgtacagagcgacatctcttcatcctcttcgtttctaagcacctcatcttcctctaccagctcaagtcaaacgacggccgcatcgacttca

SEQ ID NO: 372 - DNA, 531 bp, synthetic construct
  misc_feature 1..531: note = Description of Artificial Sequence: Synthetic polynucleotide
  source 1..531: mol_type = other DNA
ggtgcctcggctgctgatatcgcaactgcaattgctgcaagtgttgccacctccttgcaatccaatggagtactaaccgcctccaacgtgagtcaattgtctaatcagctggcatcttatgtttcttccggtctgtcctctacggcaagttcattaggaattcaattaggtgcctcccttggagccggcttcggagctagcgctggtcttagcgcctctaccgacatcagcagttccgtagaggccacttccgcttctactctatcatcaagtgcaagtagtacttcagtcgtatcaagtattaacgctcaactcgtgcccgcgttggcacagacagccgttcttaacgccgctttttctaacatcaacactcagaacgcgatccgaattgcagaactgttaacacagcaagtcggaaggcagtacggattaagtggaagcgacgtcgcaacggcatcgtcccagattagatctgctctatactctgttcaacagggttcggcttcatctgcatacgtcagcgcgattgta

SEQ ID NO: 373 - DNA, 540 bp, synthetic construct
  misc_feature 1..540: note = Description of Artificial Sequence: Synthetic polynucleotide
  source 1..540: mol_type = other DNA
ggtcctctaataacagcactcagctcacgcggagtagtgaatgcttctaattcatcacagattgcatcgtccttagctacagctattctgcagtttactgcaaacgtggcaccacaattcggtatcagcattcccaccagcgcagtgcagtccgatctatctactattagtcagtccttgacggctatttcttctcagacctcctcaagcgttgattcttcgacgtctgcattcggtggaatcagtggtccgagtggcccatctccatacggaccacaaccatccggtcctacttttggtccaggcccaagtctttctggccttactggcttcactgctaccttcgctagctctttcaagtcgacacttgcttcgtcaacccagtttcaattgatcgctcaatccaacttggacgtgcagacaagatctagcttgattagtaaagtattgataaacgctttgtcctcactaggtatctccgcctcggtagcctcttcgatagccgcatcttcttcccaatctttgctgagcgtttctgca

SEQ ID NO: 374 - DNA, 531 bp, synthetic construct
  misc_feature 1..531: note = Description of Artificial Sequence: Synthetic polynucleotide
  source 1..531: mol_type = other DNA
ggtgcttccgcggccgatatagcaaccgcaattgcagcatctgtagctacttcattacagagtaacggtgtcttgacggcatcaaacgtatctcaattgtcgaaccaattagcaagttatgtgagtagtggtttgtcaagcactgcatccagtttgggtatccaactcggcgctagcttgggtgctggtttcggtgctagcgccggattatctgctagtaccgacatctcctcgtcagtggaagcaacttcggcttcgactctgtcaagttccgcatcttccacgtcagttgttagttcaattaacgctcagctagttccagctctcgctcagaccgccgtgctgaatgccgccttttctaacattaatacccagaacgctatcagaatagctgaacttctgactcaacaagtaggcagacagtacggattgagtggttccgacgttgctaccgcatcctctcaaattagaagtgctctctatagtgtacaacagggtagtgcttcttccgcttatgtctcagccattgta

SEQ ID NO: 375 - DNA, 540 bp, synthetic construct
  misc_feature 1..540: note = Description of Artificial Sequence: Synthetic polynucleotide
  source 1..540: mol_type = other DNA
ggtccgttgataactgctttgtcgtcaagaggtgtcgttaacgcctctaactctagtcagattgcttcctctctggcaacagctattctgcaattcactgctaatgtggctccacagtttggaatctctattccaaccagtgctgttcagtctgatcttagtactattagtcaatccctaactgcaatatcttcccaaacctcgtcatctgtcgattcctctacatccgcattcggtggcatcagtggtccttccggtcctagcccatatggccctcaaccttctggtcccacattcggtcctggcccatcattatctggattgaccggattcaccgctacatttgcctcgtcgttcaagagcactttagcatctagtacacaatttcagttgatcgcccagagtaatttggacgttcaaacaagaagtagcctcatatctaaagttttaattaatgcactgagtagtctgggtatatctgccagcgttgctagctcgatagctgcaagttcctctcagtctctactcagcgttagtgca

SEQ ID NO: 376 - DNA, 513 bp, synthetic construct
  misc_feature 1..513: note = Description of Artificial Sequence: Synthetic polynucleotide
  source 1..513: mol_type = other DNA
ggtcctggttacggttacgctgcttactatgctgctaattatggctatggtcctggagtaggcgccggttctggtgcgggagccggctcaggctctggagtcggagcaggttcaggatttggagcaggtgcaggatcaggtactggactaggtagaggagctggaactggtgctggagcgggatctggagctggttcgggtgccggtgccggaagcggttctggtgctggtgcgggaagtggcagtggagcaggtgccggaagaggtgctggactcggaggttttggctctggattaggagccggagcaggaacaggagccggagctggttccggaagtggagccggcagcggagctggtgcaggcgctggatccggatttggtgcaggtgctggaagaggagctggttctggtggaacaggttcctggttgagatccggcgtcggtactggttcttctgcttctgccggctctgcaggatcaggtgcaggagtaggatctggtgctggtcca

SEQ ID NO: 377 - DNA, 507 bp, synthetic construct
  misc_feature 1..507: note = Description of Artificial Sequence: Synthetic polynucleotide
  source 1..507: mol_type = other DNA
ggtcctgcatacggatatgctgcctactacgctgccaactatggttacggaccgggtgtaggtgccggttccggtgccggagctggttccggtagcggtgcaggtgctggttcgggttcaggtgctggtgctggctcaggagctggattaggtagaggtgcgggaaccggagcaggtgccggttcaggtgctggatccggcgccggagctggttctggtagtggcgctggtgccggttcaggatcaggagccggagcaggtcgtggtgccggattaggtggtttaggctccggtttgggagctggtgcaggtacgggtgccggatcgggatctggatccggtgccggatccggagccggagctggtgctggaagcggttctggcgcaggagctggtagaggagccggatccggattaggagcaggtttgggctctggtgttggaactggatcaggtgctggagctggcgctggatcaggagctggtgttggttcaggcgctggagca

SEQ ID NO: 378 - DNA, 492 bp, synthetic construct
  misc_feature 1..492: note = Description of Artificial Sequence: Synthetic polynucleotide
  source 1..492: mol_type = other DNA
ggtccaggctacggatacgctgcatactatgccgcaaattacggatatggtccaggagtcggtgctggtagcggagctggtgctggaagtggatctggtgccggagcaggtagtggaagcggagcaggtgcaggttctggagccggtctgggtagaggagctggtactggcgctggagctggttctggagccggatcgggtgctggagctggatctggcagtggagcaggagccggatccggatctggtgctggagccggtagaggagccggtctaggtggactaggagcaggtttaggagccggagctggatctggtgcaggtgccggatccggcgcaggagctggtgctggcagtggttctggtgccggagctggtagaggtgctggactaggtggtcttggcgctggtctaggttccggtgttggtacaggcgctggtgcaggagctggcgccggttcaggtgcaggagccggatctggagccggtgca

SEQ ID NO: 379 - DNA, 504 bp, synthetic construct
  misc_feature 1..504: note = Description of Artificial Sequence: Synthetic polynucleotide
  source 1..504: mol_type = other DNA
ggtccaggttacggttatgcagcttattatgctgccaattatggttacggacctggtgttggtgcaggttcaggagccggtgccggatcaggtagtggctcgggtgctggagccggatctggttctggtgctgcagctggaagtggagccggattaggtagaggtgctggtacaggtgctggagcaggttcaggagctggttcaggtgccggatctggtgcgggtgctggatcaggtagtggagcaggagctggtcgaggtgccggtcttggtagactgggttcaggtttaggcgctggcagtggtaccggagctggagctggatcaggttctggtgctggttctggcgctggcgcaggagccggtagtggaagcggcgctggtgcgggtcttggtgctggactaggaggactgggcgccggcttggtttccggagtcggtacaggcgccggagccggagccggagctggcagcggagcaggtgcaggaagtggagccggtgca

SEQ ID NO: 380 - DNA, 504 bp, synthetic construct
  misc_feature 1..504: note = Description of Artificial Sequence: Synthetic polynucleotide
  source 1..504: mol_type = other DNA
ggtaaggccattagttccggtgctgccagtgccgcagcttctgcttctgctgcatcagcggccgctacagctgtggctgctgcttcattcagtgcttcaaccaccacgaccgccacctcaacgtcagccgctgctactggtgccgctgctgctgccggaggagaggctgctgcagtttcgagcactgcctcgtcatcatttttacaggctttggtgtcctcaatccttgaaagaccagagtttttggttccactaagtcacgctacttccgcttcttccgcttacgccatcacctcaacaattgtcagggacgcagcatacgaaaccgaattcagtaaatgggcaactcagatgagcagtgcggctgcgaaagaggttgctgaggttggaagcggagctagcgcctatgactatgcatatgccatggctcgtggtttgactaaatgtctatcgagatacaacttgattaacagccaagaccctactccttctgctagaaaatta

SEQ ID NO: 381 - DNA, 570 bp, synthetic construct
  misc_feature 1..570: note = Description of Artificial Sequence: Synthetic polynucleotide
  source 1..570: mol_type = other DNA
ggtggacaaggtggacaaggtggctacggaggtttgggttcgcaaggtgctggtcagggcggatatggagctggtcaaggtgcagccgccgcagctgcagctgctggtggcgcaggtggcgctggaagaggaggacttggtgctggtggtgctggtcaaggttacggcgctggtctaggaggacaaggaggtgcaggtcaagctgccgccgcagccgctgccggaggagctggtggcgctaggcagggaggtctgggagctggtggtgccggtcaaggatacggtgctggtttaggcggtcaaggcggtgctggacaaggaggagccgctgccgccgctgctgctgctggtggacaaggcggtcaaggaggttatggtggtctgggttctcaaggtgctggacaaggcggttacggtgccggacaaggtggtgccgcagctgctgctgctgctgccggtggccaaggaggtcaaggtggttatggtggattgggatcacagggtgctggtcagggtggctatggaggaaggcaaggtggagccggcgccgctgctgcggctgctgctgca

SEQ ID NO: 382 - DNA, 654 bp, synthetic construct
  misc_feature 1..654: note = Description of Artificial Sequence: Synthetic polynucleotide
  source 1..654: mol_type = other DNA
ggtggctatggtcctggagccggtcaacaaggaccaggaggagcgggtcagcaaggccccggatcccaaggtccaggtggagctggacaacaaggacctggaggacaaggtccatatggtccaggagctgccgctgccgctgcagccgtcggtggctatggacctggagctggtcaacaaggtcctggttcccagggtcctggctctggaggtcaacaaggccctggaggtcaaggaccatacggaccgtcggcagcagcagccgcagcagccgctggtggatacggaccaggagcaggccaacaaggtccaggttctcaaggaccaggatcgggcggtcagcagggtccaggtggtttaggcccttacggacctagtgcagctgccgcagctgccgctgctggaggctacggccccggagcgggacaacagggtcctggatctcaaggaccaggttcaggaggtcaacagcgacctggtggattgggtccatacggtccttccgctgctgcagcagcagcagcggccggaggatatggccctggagccggacaacaaggtccaggatctcaaggccctggaagcggaggacaacaaagaccaggaggtttgggaccttatggtccatcagctgccgctgcagctgctgcagca

SEQ ID NO: 383 - DNA, 834 bp, synthetic construct
  misc_feature 1..834: note = Description of Artificial Sequence: Synthetic polynucleotide
  source 1..834: mol_type = other DNA
ggtagtgcgccacaaggtgcaggtggtccagcgccacaaggtccttcccagcaaggaccagttagccagggtccatatggaccaggtgctgcagccgctgctgctgctgcaggtggttacggaccaggtgccggacaacaaggcccaggtagccagggaccaggtagtggaggacaacagggtccgggatcacagggaccaggatcaggtggccaacagggtcctggtggacaaggcccatatggtccatcggccgccgccgccgccgcagctgcagctggaggatacggaccaggagccggtcaacagggacctggttcccaaggtccaggttccggtggccaacagggacctggcggacaaggtccttacggtcctggcgcagctgctgctgccgcagctgttggtggttacggacctggtgctggacaacaaggccctggatctcaaggtccaggatccggaggtcaacaaggacctggaggacaaggaccttatggtcctagtgcggcagcagcagctgctgcagccggaggttatggaccaggtgctggtcaacaaggtccaggttcacaaggtcccggttctggtggacaacagggtccaggtggacagggtccatacggaccttcagctgccgcagctgccgctgccgcaggaggttacggtcccggagctggtcagcaaggtcctggatctggaggacagcaaggtccaggtggacaaggaccatacggctccggccagcagggaccaggtggtgcaggacaacagggcccaggcggacaaggaccttacggaccaggtgcagctgcagctgctgctgcagcagca

SEQ ID NO: 384 - DNA, 753 bp, synthetic construct
  misc_feature 1..753: note = Description of Artificial Sequence: Synthetic polynucleotide
  source 1..753: mol_type = other DNA
ggtggttacggtcccggagctggacaacaaggacccggaggtgccggacagcaaggacctggttctcaaggacctggaggtcaaggaccatatggcccaggagccggacaacaaggtcctggtagccagggaccaggttcgggtggtcaacaaggtccgggaggtcaaggcccatacggtccatccgcagctgcagcagcagctgctgccggcggttatggtcctggtgccggccagcaaggaccaggttcacagggcccaggttctggaggtcaacaaggtcctggatctcaaggtcctggtagtggtggccaacaaggaccaggtggacaaggcccatatggcccttccgccgctgctgctgcagcagcggccggaggatatggtccaggagcaggtcagcagggtccaggttctcaaggaccaggctctggcggtcagcagggacctggtggtcaaggaccttatggaccaggagcagctgccgcagccgctgctgtcggaggttacggacctggagcaggtcaacagggtccaggatcgcagggaccaggatccggtggacagcaaggtccaggcggacaaggaccttacggaccatcagctgccgctgccgcggccgctgctggaggttatggaccaggcgcaggtcaacaaggacctggtagccaaggccctggtagtggtggacaacagggtccaggtggtcaaggtccatatggtccatccgcagcggctgctgctgctgccgca

SEQ ID NO: 385 - DNA, 684 bp, synthetic construct
  misc_feature 1..684: note = Description of Artificial Sequence: Synthetic polynucleotide
  source 1..684: mol_type = other DNA
ggtggatatggacctggcgctggtcagcaaggtcctggatctggaggacagcagggacctggtggacaaggtccatatggcagcggtcaacaaggaccaggtggagcaggtcaacaaggacctggaggtcagggaccttatggccctggtgcagccgcagccgcggccgccgctgctggtggttacggaccaggcgcaggtcaacaaggtcctggcggtgctggacaacagggcccaggttcccagggcccgggtggtcaaggtccatatggtcctggagcaggacaacagggtcctggttctcagggtccaggtagtggcggtcaacaaggtccaggaggccaaggtccttacggcccatcagccgcagcggctgccgctgctgctgccggtggttacggacccggtgctggtcaacgaagtcaaggtccaggaggtcagggtccatacggtccaggtgcaggtcagcagggaccaggatctcaaggtccaggttcaggaggccaacaaggcccaggaggtcagggaccatatggtccatctgctgctgctgctgccgctgccgcaggacctggtgctggtagacaaggtcctggtagccaaggtcctggatccggaggtcagcaaggcccgggcggtcagggtccatatggaccatcggctgctgccgcagctgctgctgca

SEQ ID NO: 386 - DNA, 771 bp, synthetic construct
  misc_feature 1..771: note = Description of Artificial Sequence: Synthetic polynucleotide
  source 1..771: mol_type = other DNA
ggtcctggagcaagaaggcaaggtccaggtagtcagggcccaggttcgggtggtcaacaaggaccaggtggtcagggtccatatggtagtggccagcaaggtccaggtggcgccggtcaacaaggtccaggcggacaaggaccttacggtccaggcgctgccgccgcagcggctgcagccgcaggtggctatggtcctggtgctggccaacaaggaccaggaggagctggccaacagggaccaggaagtcaaggacctggaggacagggaccatatggtccaggagcaggacaacaaggtccgggctcccagggtccgggatctggaggacaacagggccctggaggacaaggtccatatggaccttcggccgccgcagctgcagctgccgcaggaggatatggccctggtgctggacaacagggacctggatcccaaggacctggtagtggaggtcaacaaggcccaggaggacaaggtccttacggtcccggtgcagctgccgctgctgccgctgtaggcggttacggaccaggagcaggtcaacaaggtcctggttctcaaggacctggttcaggaggacaacagggtccaggcggtcaaggcccttatggaccatccgctgctgctgctgcagctgcggcaggtggctacggtcctggtgccggacaacaaggtccaggatctcagggacctggttccggaggacaacaaggaccgggaggacaaggtccgtatggtccttctgctgccgcagccgcggctgctgca

SEQ ID NO: 387 - DNA, 765 bp, synthetic construct
  misc_feature 1..765: note = Description of Artificial Sequence: Synthetic polynucleotide
  source 1..765: mol_type = other DNA
ggtggatacggaccaggtgcaggacaacaaggccctggttccggtggacaacaaggaccaggtggacagggcccttacggctcaggtcagcaaggtccaggaggagcaggtcaacagggtcctggtggtcaaggaccttatggaccaggagctgctgccgcggcagcagcagctgccggaggttacggtccaggtgccggacaacagggtcctggaggtgctggacagcagggtccagagggaccaggttcccaaggtcctggatctggtggtcaacaaggaccaggaggtcagggcccttacggtccaggagctgcagccgctgctgctgcggtcggaggttacggacctggagctggacaacaaggacctggttcacagggacctggaagtggtggtcaacaaggtcctggaggccaaggcccatacggtccatcagctgccgctgccgcagctgctgccggtggttatggtcctggtgctggtcaacaaggtccaggatcgcaaggcccgggatcgggtggacaacagggtccgggaggtcagggaccatatggcccaagtgccgctgcagcagccgccgcagctggtggatatggaccaggagcaggtcaacaaggacctggatccggtggacaacagggaccaggtggacaaggaccatatggatctggtcaacagggaccaggaggtgctggccagcaaggccctggtggtcaaggaccatatggtccaggagcggccgctgctgcggccgctgctgca

SEQ ID NO: 388 - DNA, 756 bp, synthetic construct
  misc_feature 1..756: note = Description of Artificial Sequence: Synthetic polynucleotide
  source 1..756: mol_type = other DNA
ggtggatacggtccgggtgcgggtcaacagggaccaggtggagctggtcaacagggacctggatcacaaggacctggaggtcaaggcccttatggtcccggtgcaggacaacaaggacctggatcgcaaggtcctggatctggaggacagcaaggtcctggtggccaaggcccatacggtccatcagccgcagctgccgcagctgctgccggaggttatggaccaggtgctggtcaacaaggcccgggttcacaaggacctggtagtggtggtcagcaaggaccaggtagtcagggaccaggatcaggtggacaacaaggtccgggtggtcaaggtccatatggaccgtccgctgcggctgcagcagctgctgccgcaggaggttacggacctggcgctggtcaacagggtccaggttcccaaggacctggttctggaggtcaacaaggtccaggtggacagggcccatacggaccaggagcagccgccgccgcagctgctgtgggtggttatggtccaggtgccggacagcaaggaccaggatcccaaggaccaggttctggcggccaacagggtccaggaggccagggcccttatggaccaagtgctgccgcagccgccgcagcagcgggtggttacggtccaggtgccggtcaacaaggaccaggatctcaaggtccaggttccggcggtcaacaaggcccaggaggtcagggtccttatggaccatcggcagctgctgctgctgcagcggca

SEQ ID NO: 389 - DNA, 783 bp, synthetic construct
  misc_feature 1..783: note = Description of Artificial Sequence: Synthetic polynucleotide
  source 1..783: mol_type = other DNA
ggtggttacggtccgggcgctggacaacaaggaccaggttctggtggacaacaaggtcccggtggacaaggtccttacggttcaggccagcaaggtccgggaggagctggtcaacaaggaccaggcggtcaaggtccatacggaccgggagcagcagctgcagcagcagccgctgctggtggatatggtcccggagctggtcaacagggacctggaggagccggacaacaaggacctggtagtcaaggtcctggtggacaaggtccatacggcccaggagcaggtcagcaaggtccgggttctcaaggtcctggctcaggtggacaacaaggcccaggtggacaaggaccatatggtccttctgctgctgccgctgctgcagcagcaggaggatatggaccaggtgctggtcaacagggtccaggttctcagggcccgggttccggaggacagcaaggaccaggcggacaaggcccttacggaccgtcggccgccgctgcggctgctgcagcaggaggatacggtcctggcgcgggtcaacaaggtcctggatctggcggtcagcaaggtccaggaggtcaaggaccatacggttctggtcaacaaggcccaggaggagctggacagcagggccctggaggtcaaggtccttacggtggcggttatggtccaggtgctggacaacagggtcctggatcgcagggaccaggaagtggcggtcaacaaggtccaggtggtcaaggtccttatggtcctagcgccgctgcagctgcagctgcagca

SEQ ID NO: 390 - DNA, 774 bp, synthetic construct
  misc_feature 1..774: note = Description of Artificial Sequence: Synthetic polynucleotide
  source 1..774: mol_type = other DNA
ggtccaggagcccgtagacaaggtccgggctcacaaggtccaggatctggtggacaacaaggaccaggtggccaaggcccatacggatctggacaacagggtcctggtggagctggtcaacagggtccgggcggtcagggcccctacggtccaggagcagcagctgctgcggctgctgcagcaggaggatatggacctggagccggtcaacagggacctggaggtgctggccagcagggtcctggttctcagggaccaggtggtcagggtccatacggcccaggcgccggtcagcaaggaccaggttcacaaggcccaggctctggaggtcagcaaggacccggaggtcaaggtccttatggtccaagtgccgctgctgctgctgctgcagctgcaggaggatacggtccgggagctggtcagcaaggacctggttcgcaaggtcctggtagtggtggccaacaaggtccaggtggtcaaggaccgtacggtccaggagctgcagctgccgccgctgctgtaggaggatacggtccaggtgctggtcaacaaggtcctggaagtcaaggtccaggatccggaggtcagcagggacctggtggacaaggaccttatggtccttctgcagcagctgcagcggctgccgctggtggatatggtcctggagctggacagcagggcccaggatctcagggcccgggttctggaggacaacaaggacctggtggacagggtccatacggaccttccgctgccgccgcggcagctgcagca

SEQ ID NO: 391 - DNA, 732 bp, synthetic construct
  misc_feature 1..732: note = Description of Artificial Sequence: Synthetic polynucleotide
  source 1..732: mol_type = other DNA
ggtggtcagggaggaagaggaggattcggaggtctaggatcacagggcgagggaggagccggacagggaggtgcaggcgcagctgcagctgctgccgctgcaggagctgatggtggtttcggtctaggaggctacggagctggacgaggttatggagcaggactaggaggtgcaggtggagctggtgctgcttcagctgccgctgccgctggtggtcaaggtggaaggtctggtttcggtggcctgggttctcaaggagccggcggtgcgggtcaaggaggtgccggcgctgccgccgcagctgctgcagctggtgccgacggtggctctggtctgggaggatatggagctggacgtggttatggagctagcttgggtggagctgatggtgctggagctgcctccgcggcagccgccgctggaggacaaggtggcaggggtggttttggtggtttgggctctcaaggagcaggtggtgcgggacaaggtggtgccggtgctgctgccgccgctgctgctgcatctggagacggaggttctggattaggaggttatggtgccggaagaggatacggcgctggtcttggaggcgctggcggtgctggtgccgcttctgccgcagctgctgccggtggtgaaggaggacgtggaggttttggaggactcggatctcagggcgctggtggtgcaggacaaggtggctccctcgcggcggccgcagccgcagccgca

SEQ ID NO: 392 - DNA, 723 bp, synthetic construct
  misc_feature 1..723: note = Description of Artificial Sequence: Synthetic polynucleotide
  source 1..723: mol_type = other DNA
ggtgctgatggcggttcaggacttggaggttacggtgccggtagaggttacggagcaggactaggtggagctgatggagccggtgccgcttctgctgcagccgccgcaggaggacaaggtggtagaggtggttttggtagactcggttcgcaaggagctggaggagcaggtcaaggtggagctggcgcagccgctgcggttgccgcggcgggaggtgacggaggttcaggtcttggcggttacggcgctggtagaggatacggcgctggtttaggtggtgctggcggagctggagccgcatccgctgcggccgccgctggaggccaaggcggccgaggaggtttcggtggactgggatcacaaggagctggtggagctggccagggaggtgctggcgcagccgcctcgggagatggaggtagcggactaggtggatacggagctggccgtggttacggagctggattgggaggcgctgatggtgctggtgccgcttcagctgcttcagcagccggtggccaaggaggtaggggtggttttggaggactcggaagtcaaggagcaggaggagccggtcaaggcggtgctggtgcggccgccgctgcagctactgccggtggtgatggaggctccggactaggaggttatggtgccggaagaggttacggtgcgggcctgggcggtgctggaggtgcaggtgctgcttcggccgcagccgccgca

SEQ ID NO: 393 - DNA, 840 bp, synthetic construct
  misc_feature 1..840: note = Description of Artificial Sequence: Synthetic polynucleotide
  source 1..840: mol_type = other DNA
ggtggacagggcggaagaggaggttttggaggattgggatcccaaggtgctggaggagccggacagggtggcgctggagcagctgctgccgcagctgctgctggaggtgacggaggttccggtttaggcggttacggcgccggtcgaggacacggagtaggtcttggaggtgccggtggtgcgggtgccgcttccgctgctgcagctgccggtggtcaaggaggacgcggaggtttcggaggacttggatctcaaggtgctggtggtgccggtcaaggtggtgctggtgccgctgcagcggctgctgcagctggtggtgatggcggttcaggtttgggaggatacggtgcaggtagaggtcacggtgctggtttgggcggtgccggaggcgcaggtgctgcctctgcagcggcagcagctggaggtcaaggtggaagaggaggatttggtggcctgggttcgcaaggctccggtggagcaggtcagggaggatctggagctgctgctgcagccgctgctgcaggcggagacggtggttctggcttgggtggttatggagccggtcgtggttatggcgcaggtctgggtggtgctggcggagctggcgcagcttccgctgcggctgccgccggaggccagggtggaaggggaggattcggaggattaggatcgcaaggtgccggtggcgccggacaaggaggatcaggagctgctgctgccgctgccgcagccgtcgctgacggtggatctggtttgggaggatatggtgcaggcaggggatacggagctggattaggaggtgcaggaggtgctggtgcagcttcagcagccgctgccaca

SEQ ID NO: 394 - DNA, 693 bp, synthetic construct
  misc_feature 1..693: note = Description of Artificial Sequence: Synthetic polynucleotide
  source 1..693: mol_type = other DNA
ggtggtcaaggcggacaaggaggatatgacggactaggtagccaaggtgcaggtcaaggaggttacggtcagggaggagccgctgcggcggctgcagctgcctctggtgcaggatccgctcaaagaggaggtttgggtgcaggtggtgccggacaaggttacggtgccggatccggcggtcaaggaggcgcaggtcaaggaggcgccgctgcagccactgctgctgccgctggtggacaaggcggtcaaggtggttacggtggattgggatctcaaggatcaggccaaggcggctacggccaaggaggtgctgctgctgctgcggctgccgcatcaggtgacggaggagctggtcaagaaggacttggtgctggtggagctggacaaggttatggcgccggtcttggtggacagggtggcgcaggacagggtggtgctgccgccgctgctgctgcagccgctggaggtcaaggcggtcagggcggatatggtggcttaggctctcaaggtgctggacaaggtggttatggacaaggtggtgcagctgcagctgctgctgcggcctctggagctggtggtgctggccaaggaggtctaggcgcagctggcgctggtcaaggttacggagcaggatctggcggacaaggtggtgccggtcaaggtggagctgctgcagcagctgccgcagcagca

SEQ ID NO: 395 - DNA, 693 bp, synthetic construct
  misc_feature 1..693: note = Description of Artificial Sequence: Synthetic polynucleotide
  source 1..693: mol_type = other DNA
ggtggacaaggaggtcaaggaggttacggtggattgggttctcagggagctggtcaaggtggatacggacagggaggtgttgctgcagctgcggctgctgccagcggtgcaggaggagccggacgtggtggtctgggcgctggtggtgccggtcaagaatacggagcagtttctggtggacaaggaggtgcgggtcagggaggtgaggctgcagctgctgcagcagctgccggtggccagggaggacaaggtggctatggtggactcggtagtcaaggagcgggtcaaggcggatatggtcaaggtggtgctgccgcagctgccgctgcagcctccggtgccggaggtgctagacgtggtggattaggagctggaggtgcaggacaaggatatggtgccggattgggtggacaaggtggagccggtcaaggaagcgcttcagccgccgcagctgctgcagctggaggacagggaggtcaaggtggatatggcggacttggtagtcaaggcagtggtcaaggtggttatggacagggcggtgccgctgctgctgcagccgctgcatcgggtgctggaggtgccggccgaggatctttgggagccggaggcgccggacaaggttacggtgctggacttggtggtcaaggtggagcaggtcagggtggtgccgctgctgccgcttctgctgcagca

SEQ ID NO: 396 - DNA, 405 bp, synthetic construct
  misc_feature 1..405: note = Description of Artificial Sequence: Synthetic polynucleotide
  source 1..405: mol_type = other DNA
ggtggttatggtcctggagccggacagcagggacagcaagcgggtcaaggttccggacagcagggcccaggtggtgcaggacaaggtggtccacgaggtcagggaccttatggacctggagcagctaccgctgcagcagcagctgcaggacctggttacggtcctggagctggacaacaaggtccgggttcgcaaggtcctggttcaggaggacagcaaggacctggttcacaaggtccttatggcccatctgctgctgccgctgctgccgcagcaggaccaggttacggacctggtgctggtcaacaaggtcctggtagtcagggccctagaagtggaggacaacaaggccctggtggacaaggaccttacggtccttccgccgctgctgctgccgccgcagca

SEQ ID NO: 397 - DNA, 420 bp, synthetic construct
  misc_feature 1..420: note = Description of Artificial Sequence: Synthetic polynucleotide
  source 1..420: mol_type = other DNA
ggtccaggttatggaccaggagctggtcagcagggccctggttccggtggacaacaaggtggaccaggctctggccaacagggcccaggtggtgccggtcaaggaggacctagaggtcaaggtccatatggtccaggtgcagctgccgccgccgcagctgcagctggtggatatggaccaggtgctggccagcagggaccaggttctcagggacctggtagcggtggccaacagggaccaggaagtcagggcccatatggacctagtgctgctgcagctgctgctgccgcgggtccgggatatggcccaggagcaggacagcaaggccctggctctcaaggccctggttcaggtggacagcaaggtccaggaggacaaggaccttatggtccatctgcagctgctgccgctgcagcagca

SEQ ID NO: 398 - DNA, 420 bp, synthetic construct
  misc_feature 1..420: note = Description of Artificial Sequence: Synthetic polynucleotide
  source 1..420: mol_type = other DNA
ggtccaggatatggaccaggtgcaggacagcagggaccgggatcaggaggacaacaaggcggtcaaggttcaggtcaacaaggtccaggaggtgctggccagggaggtcctagaggtcaaggaccatatggacctggtgccgctgcggctgccgcagctgcagcaggtggttacggtccaggtgccggacagcaaggcccaggatcacagggtccaggttctggtggtcagcagggtccgggttcgcaaggaccctatggtccatcagccgcagctgctgctgccgcagctggtccaggttacggacctggtgctggccaacaaggaccaggcagtcagggtccaggtagtggtggtcaacaaggcccaggtggtcaaggaccttacggtccatctgctgctgccgctgctgcggcagca

SEQ ID NO: 399 - DNA, 417 bp, synthetic construct
  misc_feature 1..417: note = Description of Artificial Sequence: Synthetic polynucleotide
  source 1..417: mol_type = other DNA
ggtccaggatacggcccgggagccggacaacagggtcctggttcaggaggtcaacaaggcggccaaggttctggccaacaaggacctggtggtgctggacagggaggtccaaggggtcaaggaccatatggtccaggtgctgctgctgctgccgccgctgctggtggttatggccctggagctggacaacaaggaccgggttctcaaggaccaggctctggaggtcagcaaggcccaggttcccaaggcccgtacggtccatctgcagcagcagctgccgctgctgctggtcctggttatggtccaggagctggacagcaaggtcctggatctcagggtccaggatctggtggacagcagggaccaggaggtcaaggtccatatggaccatctgacgctgctgccgcagctgcagca

SEQ ID NO: 400 - DNA, 417 bp, synthetic construct
  misc_feature 1..417: note = Description of Artificial Sequence: Synthetic polynucleotide
  source 1..417: mol_type = other DNA
ggtcctggttatggacccggtgccggacaacaaggaccgggttcaggtggccagcaaggaggtcaaggttcaggacaacaaggtcctggtggtgctggacagggaggacctagaggtcaaggaccctacggtccaggagcagcagctgcggccgctgctgctggaggatacggtccaggtgcaggacagcaaggacctggctcacagggaccaggcagtggaggacaacagggacctggctctcaaggtccgtatggtccaagtgctgccgcggcagcggctgctgccggtccaggttacggccctggtgcaggtcaacagggcccaggttcacaaggtcctggttctggtggacagcagggtccaggttctcaaggaccttatggtccatctgccgcagctgccgcagctgctgca

SEQ ID NO: 401 - DNA, 552 bp, synthetic construct
  misc_feature 1..552: note = Description of Artificial Sequence: Synthetic polynucleotide
  source 1..552: mol_type = other DNA
ggtgcagcagccgcgtccgaggcagcagcctccgctgccgcaacatccacaaccacaacaacaagcacttccagagcggcggccgccgcctcggctgcagccgcagcttctgcatctggtgctgctggtgctgcaggagcagcctctgctgcatccgctgcttctgcaagctcctcgttgcagcaatcacttggttcagccctggcacaaagtagttcttttgctgccgcgtttgctcaagcatccagtgctgccagcgcagctgctattgcttatgccttagctcaaacggttgccaaccaaataggtttctccagttattcgtccgcatttgccagagccgcatcttccgccgtatattctattggaggtttggcttctgcgagcgcttatgcattcgcatttgcttctgcctttagtcaagtattgtctaactatggactcctcaatatcaacaatgcttatagcttggcttcatccattgcctcagctgcctcctcgtctgcttcaagcgccgctgccgctgctgccagctcgtctagtgccgctgca

SEQ ID NO: 402 - DNA, 549 bp, synthetic construct
  misc_feature 1..549: note = Description of Artificial Sequence: Synthetic polynucleotide
  source 1..549: mol_type = other DNA
ggtgctgccgcagcttcgggaactgcagcttccgcagcagctacttcaacaactaccacaacatcaacttctagagccgcagcagcggcaagtgcggcagcagctgcttccgctagtggtgctgctgatgccgctggtgctgcatccgctgcaagcgctgcttcagcatcctcatctctccagcagtcccttggttctgctcttgcccaaagttcgtcatttgctgcagcattcgcacaagcgaattctgcagccagtgctgcagccatagcctacgctttggcacagacagttgccaatcaaattggcttttcatcatacagttctgcgttcgcgtctgccgcatctagcgctgtatctagtttgggcggattcgcttcagcttcagcttacgcttttgcatttgctagtgcattttcacaagttttgtcaaattatggcttactgaacattaataatgcctactcattggccagttccattgcatctgctgctagttcttcagcctcaagcgccgctgccgctgcttcttcatcttccgctgccgca

SEQ ID NO: 403 - DNA, 531 bp, synthetic construct
  misc_feature 1..531: note = Description of Artificial Sequence: Synthetic polynucleotide
  source 1..531: mol_type = other DNA
ggtagtggtgctgcgagggccgctcagacagcctccgccgcttccgctgcatctgcttcgagttcacttcagcagtcacttggttccgcactcgctcaaagctcaagttttgcggctgcgtttgaccaggctaactcagccgcttcggctgctgcaatcgcttacgccctggctcaatctgctgcaaaccaagtaggactgagctcatattctgcagctatttctaatgctgcggcagctgctgtgggttccgtcggaggctacgcttctgcttcggcttatgcttttgcgtttgcatctggagtttcacaagtgttgagtaactacggattaattaatctatctaacgcattgtttttggccagtagtattgcaaatgcagcaagtgcaagtgcatcctctgccgcagccgcagctagttcttcgagcgcagctacgggcgccgctgctgcactgggtggtgccggtagtgctgcagcaacctccacgactactatcacttcgacctctacggcggtggcagcagcttca

SEQ ID NO: 404 - DNA, 708 bp, synthetic construct
  misc_feature 1..708: note = Description of Artificial Sequence: Synthetic polynucleotide
  source 1..708: mol_type = other DNA
ggtcctggaggttacggtggaccaggacagcagggtcctggtcaaggacaacaacaaggacctgcttcagctgccgcggccgctgctgccgctggacctggaggatatggtggacctggtcagcaaggacctggacaaggtcaacagcagggtcctgcaagcgctgccgcagcggctgccgccgctgcgggtcctggtggatacggaggacctggacagcagcgtcccggacaggctcaatacggtagaggtaccggtcaacaaggtcaaggtccaggtgctcaacaaggtccagctagtgcagctgccgcagctgcagctggagctggattatacggcggaccaggtcaacaaggccctggtcaaggtcagcaacaaggacccgcatcagcagcagctgccgctgccgctgctgccgcagctggaccaggcggatatggtggtccgggtcaacagggtccaggacaagcccaacagcaaggaccagcctctgctgctgctgccgctgctgctggcccaggaggctactccggaccaggacagcaaggtcctggacaggctcaacaacagggtccagcttcagccgctgccgccgccgccgctgccgctggtccaggtggttacggtggtcctggccaacagggtccaggtcaaggccaacaacagggacctgcttccgctgctgctgctgcagccgctaccgcagca

SEQ ID NO: 405 - DNA, 684 bp, synthetic construct
  misc_feature 1..684: note = Description of Artificial Sequence: Synthetic polynucleotide
  source 1..684: mol_type = other DNA
ggtccaggaggatacggtggtccaggtcaacagggacccggacagggtcaatatggtccaggtactggtcagcaaggacaaggaccgtctggacaacagggaccagcaggcgctgccgcagcagcagccgctgcggcaggtcctggaggttatggtggtccaggtcagcagggtccaggtcaaggacaatacggacctggtgctggacaacaaggccaaggtcctggtggccaacagggtccggcgggtgctgctgctgcagccgctgctgctgcaggacccggtggttatggaggtccaggtcaacaaggacctggccaaggacaacaacaaggtagggcaggagcagcggctgcggccgctgctggaccaggaggctacggaggtccaggacagcaaggtcctggtcaagcacagcaacaaggaccggcagcagccgctagtgctggacctggtggttacggtggtcctggtcaacaaggacccggtcaaggtcaacagaagggacctgcatcagctgcagctgcagctgctgccacagcagccggtccaggaggatatggcggtcctggtcaacagggtcctggtcaaggccagtacggccctggtaccggtcaacagggtcaaggtccaggtggtcaacaaggtcctgcatcagctgccgccgctgcagctgctgctgca

SEQ ID NO: 406 - DNA, 732 bp, synthetic construct
  misc_feature 1..732: note = Description of Artificial Sequence: Synthetic polynucleotide
  source 1..732: mol_type = other DNA
ggtcctggtggatacggtggaccaggccagcctggaccgggacaaggtcaatatggccctggtccaggccagcagggaccaagacagggtggtcaacagggtccagctagtgccgctgccgctgccgcagccggtccaggcggctacggtggtcctggacaacagggaccacggcagggtcaacagcaaggtcctgcatccgcagctgctgccgctgctgccgcagctgcgggtcccagaggttacggtggaccgggtcagcaaggaccagtacaaggaggacaacaaggacctgcctctgccgcagctgccgcagctgctgctggtgttggaggatatggtggtccgggtcaacaaggaccaggacaaggccaatacggtcctggaactggtcaacaaggacagggaccatccggacagcagggtcctgctggtgccgccgctgcagcagctggtggtgctgctggtccaggtggttatggaggtccaggacaacaaggtccaggtcaaggacaatatggtccaggaacaggtcaacagggccaaggcccaagtggtcaacaaggtccggcaggagcagccgcggctgccgctgctgctgccggtccgggaggttatggtggcccgggacaacagggtccaggacagggacagtatggtcctggtgcaggtcagcagggtcaaggtcctggttctcagcaaggtccagcatcagcggctgcagcagcagca

SEQ ID NO: 407 - DNA, 900 bp, synthetic construct
  misc_feature 1..900: note = Description of Artificial Sequence: Synthetic polynucleotide
  source 1..900: mol_type = other DNA
ggtcctggtggttacggaggtcctggtcaacaaggtccaggtcaaggtcagtacggacctggaacaggtcaacaaggtcagggacctggtggacagcaaggaccagttggtgccgctgctgcggccgctgctgcagtttctagcggcggatatggttcgcaaggcgccggacaaggtggacaacaaggatccggtcagggcggaccagccgctgccggacctggaggttacggaggacctggtcagcagggtcctgagcagggtcaatacggttccggtgcaggtcaacaaggacaaggtcctggtggacagcagggacctgcttctgccgccgccgccgccgcagctggcccgggtagatacggtggaccaggtcagcagggacctggacaaggtcagtatggtccaggtacgggacagcagggtcagggtccagcatccgctgctgctgctgccgcagcaggaccaggaggttatggaggtccgggtcagcaaggtcctggtcagggcagaggaacaggacagcagggtcaaggattaggaggccaacaaggtcccgattctgctgccgctgctgccgccgctgccggtccaggaggttatggtggaccaggtcaacagggtccaggacaaggacaatatggacctggtacgggacaacaaggacaaggacctggcggtcaacaaggacccgtcggagctgccgcagctgctgcagctgcagtctcctctggaggatatggatcgcaaggcgctggacaaggaggacaacagggaagcggtcagagaggaccagcagctgctggtccgggaggttactcaggccctggacaacaaggccctggtcaaggtggacagcaaggtcctgcaagtgctgcagctgcagctgccgctgcagca

SEQ ID NO: 408 - DNA, 726 bp, synthetic construct
  misc_feature 1..726: note = Description of Artificial Sequence: Synthetic polynucleotide
  source 1..726: mol_type = other DNA
ggtccaggaggttatgtaggtagtggtcagcaaggtcctggacagggaagaggtaccggacaacagggtcaaggaactggtggtcaacaaggtcctgctagtgccgctgcttccgcagctgctggaccgggcggatatggaggccctggtcaacaaggacctggacaaggaggccagcagggtccagccacagcggccgctgccgctgctgcggcagctggtcctggaggatatggaggtcctggtcaacagggtccaggtcaaggacaatatggaccaggtacaggtcaacaaggacagggtccaggcggtcaacagggaccagcaggcgccgctgctactgccgcagctgccgcaggacctggcggctatggaggacctggccagcagggcccagaacaaggtcaatatagaccaggagctggccagcagggacagggcccaggaggacaacagggcccagctagtgccgccgctgcagctgctgctggtccgggaggctatggtggtccaggtcaacaaggtccaggacgtggtcaatacggtccaggtactggacaacaaggtcagggtccggcctcggctgctgcagctgctgcagccggtcctggtggctatggaggtcctggacagcagggaccaggtcaaggaagaggaacaggtcaacagggacagggtttgggaggtcaacaaggaccagattctgcagctgcagctgccgcagca

SEQ ID NO: 409 - DNA, 687 bp, synthetic construct
  misc_feature 1..687: note = Description of Artificial Sequence: Synthetic polynucleotide
  source 1..687: mol_type = other DNA
ggtccaggaggatacggaggaccaggtcaacaaggtccgggtcaaggccagtatggaccaggaactggacaacaaggacaaggaccaggtggacagcagggaccagttggagctgctgcggctgcagctgcggctgtgtctagtggtggttatggttcccagggtgctggtcagggtggccaacaaggctctggacagagaggtccagctgccgctggaccaggcggttattccggtccgggtcaacagggccccggacaaggtggccaacaaggaccagcatccgccgctgctgcagctgctgccgctgcaggtcctggtggatatggtggttccggccagcagggtcctggacaaggacgaggaactggtcaacagggtcaaggtccaggcggtcaacaaggtcctgcttcggcggccgccgcagctgccgccggacctggaggatatggaggtcccggtcaacaaggcccaggtcaaggtcaatatggacctggtactggacagcagggccaaggtcccgcttctgctgctgctgcagccgccgctggacctggtggatatggcggaccaggtcagcaaggtcctggtcagggtcaatacggtccaggtactggacagcaaggccaaggtccaggtggtcagcaaggaccgggaggagcaagtgctgctgcagctgcagcagca

SEQ ID NO: 410 - DNA, 468 bp, synthetic construct
  misc_feature 1..468: note = Description of Artificial Sequence: Synthetic polynucleotide
  source 1..468: mol_type = other DNA
ggtacaggaggagttggtggattgttcctatccagcggtgactttggacgaggtggtgctggagctggcgctggtgcggccgccgctagcgcagctgccgcatctagcgcagctgctggtgctagaggaggttccggattcggtgttggtacaggcggttttggacgtggcggagccggagcgggtactggtgctgctgctgccagtgcagccgccgcctctgctgcggctgcaggagctggtggagatggtggcctattcctgagtagtggagattttggacgtggaggagcgggcgctggcgctggagctgccgcagcctctgctgctgccgcatcatctgccgccgcaggagcacgtggtggatcaggattcggagttggaacgggcggatttggcagaggtggagcaggagatggagcttcagcagcggcggcatcggcagcagcagcttcagctgctgctgca

SEQ ID NO: 411 - DNA, 702 bp, synthetic construct
  misc_feature 1..702: note = Description of Artificial Sequence: Synthetic polynucleotide
  source 1..702: mol_type = other DNA
ggtgctggaggtgatggcggtttattcctgagctctggtgacttcggtcgaggtggcgcaggagccggagctggtgccgctgctgctagcgcagcagccgcttcttccgctgctgctggagccaggggaggatctggcttcggagtcggtaccggaggctttggtcgtggaggagccggtgatggagcttccgccgctgcagcttccgcagccgccgcctccgccgcagcagctggagcaggaggtgattccggactatttttatctagtggcgattttggtagaggaggagcaggtgctggtgcaggtgctgcagccgcgtcggccgctgcagcatcggcggccgccgccggtactggcggagtcggtggattattcctttcaagtggagattttggaagaggtggtgcaggagctggtgctggtgctgctgcagcttcagccgctgcagcatcttcggctgccgccggagcgcgtggaggttctggattcggcgttggtaccggaggattcggtcgtggaggaccaggtgctggtactggagccgcggctgccagtgctgccgctgcttcagcagctgcggcaggcgccggaggagattctggacttttcttatcttccgaggatttcggaagaggaggagctggtgccggtacaggtgccgcagcggcatccgcagcagctgcctctgctgccgctgca

SEQ ID NO: 412 - DNA, 729 bp, synthetic construct
  misc_feature 1..729: note = Description of Artificial Sequence: Synthetic polynucleotide
  source 1..729: mol_type = other DNA
ggttcaggtgctggtcaaggtaccggtgctggtgctggtgctgctgctgcagcagccggtgccgcaggtagtggagctggtcaaggtgctggatctggagcaggcgcggctgcagcggcggccgcggcttccgctgcaggtgcgggccaaggtgctggatcaggtagcggagctggtgcggctgcggctgctgcggccgccgctggtgctggccaaggagctggaagcggatccggagccggcgcggctgccgctgctgccgcagcagccgcagcagctcaacaacaacaacaacagcaagcagcagctgctgcagcagctgccgctgcagccgcagctggttctggtcaaggtgcctctttcggagtaacgcaacaattcggtgcaccatctggtgctgcctcctctgctgctgccgctgctgctgcagcggctgccgccgctgctggcagtggtgcaggccaagaagctggcacaggtgctggtgcagccgcggctgctgcagccgcaggagcagccggatcgggtgcaggtcaaggcgctggaagtggagccggtgctgctgctgctgcggctgcagctgcctcagctgctggcgcgggacaaggtgctggttctggttcaggagctggtgctgccgcagctgctgctgctgccgccgctgcggcacaacagcagcagcagcagcaagcggcagcagctgcagctgctgccgctgcagctgccgca

SEQ ID NO: 413 - DNA, 567 bp, synthetic construct
  misc_feature 1..567: note = Description of Artificial Sequence: Synthetic polynucleotide
  source 1..567: mol_type = other DNA
ggtggtgctggacaatctggctcaggtccatacggtgcttcttacttgtcctctacaacctatactacttcctctcaaggagcaggaggtggcgtcggtggttacggtcaaggttcaggaactggttccgctgcagctgctgctggtgctgctggcgctggccaaggaggccaaggaggttatggacaaggtgctggacagggtggtttgggtggatacggacagggtggtggagctggtgcagcagccgcagccgcggctgcagcaggaggtgcaggttccggtcaaggaggatatggaggccaaggaggcttaggtggttacggacagggtgctggtgctggtgctgctgccgcagccgctgccggaggtgcgggagcaggtcaaggtggatttggtggacaaggtggatatggacaaggtggcggcgctggagcagcagctgccgctgcagctgcagccgctgcaggcggagcaggatccggtcaaggtggttatggcggacaaggtggtcttggaggctatggacaaggagctggtgctggagctgctgctgcagcagctgca

SEQ ID NO: 414 - DNA, 498 bp, synthetic construct
  misc_feature 1..498: note = Description of Artificial Sequence: Synthetic polynucleotide
  source 1..498: mol_type = other DNA
ggtggtgcgggagctggtcagggctcctatggaggacaaggtggttacggacaaggaggagccggtgccgccacagctaccgctgctgcagctggtggtgccggatccggacagggaggttatggaggtcaaggaggactgggtggctatggacaaggtgccggtgctggtgctgctgcagccgcagcagctgctgctggaggagccggcgctggtcaaggtggttacggtggtcaaggtggccagggaggatacggtcagggagccggtgcaggtgcagctgcagcagccgctggcggcgctggtgcaggtcaaggaggctacggcggacagggaggatatggtcagggtggtggtgctggagctgctgcagctgctgctgctgcatctggaggatcaggatccggtcaaggaggttacggaggtcaaggtggattgggcggttacggtcagggtgctggagccggagctggagccgctgcatcagcggcagccgca

SEQ ID NO: 415 - DNA, 456 bp, synthetic construct
  misc_feature 1..456: note = Description of Artificial Sequence: Synthetic polynucleotide
  source 1..456: mol_type = other DNA
ggtgccggatctggtcaaggtggttacggtggccagggaggactgggaggttatggacaaggtgccggtgccggcgctgcagcaggagcctcaggctcaggctctggtggcgctggtcaaggaggtttaggcggttacggccaaggtgctggtgcaggtgcggctgcagcggctgcaggagctagcggagccggccaaggaggattcggaccatatggttcctcttatcaaagtagtacatcttactcagttacttctcagggagctgctggtggactcggtggatatggtcagggttccggcgctggagccgcagctgccggtgcggcaggacaaggtggtcaaggaggatatggccaaggtgcaggagcgggtgctggagcaggtgctggacaaggtggcctgggtggatacggtcaaggtgccggttcatctgctgcatctgctgccgctgca

SEQ ID NO: 416 - DNA, 684 bp, synthetic construct
  misc_feature 1..684: note = Description of Artificial Sequence: Synthetic polynucleotide
  source 1..684: mol_type = other DNA
ggtcaaggtggtcagggaggatatggtggtttaggtcagggaggttatggtcagggtgctggttcgtctgcagctgcagcagctgccgccgccgccgcagctgccgctgcaggtaggggtcaaggtggttacggtcaaggatccggaggaaatgctgctgcggccgccgcagctgcagcagcagcagcatctggccaaggtggacaaggtggtcaaggaggacaaggtcaaggcggttatggccaaggtgcaggatcatcagctgcagcggctgccgctgctgctgctgcggctgccgctgcgggtcagggtcaaggtcgttacggtcaaggagctggtggcaacgccgcagctgctgcagctgcagcggccgccgctgctgccggtcaaggaggccaaggaggtcaaggtggtctgggccaaggtggatatggtcagggagcgggatcttcagccgctgctgccgcagcatcagctgcagcagccgccgctggtagaggtcagggcggatatggtcaaggcgctggcggtaacgcagctgccgcagctgctgccgccgctgccgcagctgccgccggtcagggtggtcaaggaggttatggtggtctaggtcaaggcggatacggacaaggtgctggatcatcagcagctgccgctgctgcagctgctgctgccgctgctgca

SEQ ID NO: 417 - DNA, 561 bp, synthetic construct
  misc_feature 1..561: note = Description of Artificial Sequence: Synthetic polynucleotide
  source 1..561: mol_type = other DNA
ggtggacagggtggtcagggacaaggtagatatggacagggtgccggatcctcggccgcagcagctgccgcagctgctgccgctgctgcagctgccggtcaaggacaaggtggttatggtcaaggtgctggtggtaatgcagccgcagctgctgctgccgcagctgcagccgccgctggtcaaggtggacagggcggacaaggtggattgggccaaggtggatacggtcaaggtgcaggctcgtctgcagcggcagctgccgctgctgctgcagctgctgcagctggacgtggacagggtggctacggacagggtgccggcggaaatgctgccgctgccgcagccgccgcagctgaggctgctgctgccggacaaggaggccaaggaggatatggaggattgggtcagggtggttacggacaaggtgctggtagttccgcagcagcagctgcagctgccgctgcagcagctgctgctggacgtggtcagggtggttatggacaaggtgcgggtggtaacgccgcagctgcagctgcagccgcggcagcagcagcagccgca

SEQ ID NO: 418 - DNA, 585 bp, synthetic construct
  misc_feature 1..585: note = Description of Artificial Sequence: Synthetic polynucleotide
  source 1..585: mol_type = other DNA
ggtcaaggtggccaaggtggctacggtggcttgggtcaaggtggttacggacaaggagctggatcatcagccgctgctgctgcagctgctgctgctgcagcagccgccggcggccagggaggtcagggacagggacgttatggccaaggagccggttcatctgcagcagctgcagcggcagctgctgctgcggccgctgctgctggaagaggacaaggtggttatggtcaaggttctggcggaaatgctgctgctgccgctgcagctgctgccgctgctgcctctggtcaaggatcacaaggcggtcaaggtggacagggtcaaggcggatacggacaaggcgcgggttcttcagcagccgctgctgcggccgccgctgccgctgctgctgcctcaggaagaggtcagggtggatacggacagggagcaggaggtaatgcagccgcagccgcggccgctgctgcagcggctgcagcagctggtcaaggtggtcaaggcggatatggtggtttgggtcaaggcggttacggacagggtgctggtagttctgctgcagcagcagccgctgcagctgccgccgcagca

SEQ ID NO: 419 - DNA, 561 bp, synthetic construct
  misc_feature 1..561: note = Description of Artificial Sequence: Synthetic polynucleotide
  source 1..561: mol_type = other DNA
ggtggacaaggtggccagggtcaaggtggttacggacagggtgctggtagttctgctgccgccgccgcagcagcagcggccgctgcagctgctgctggtagaggtcaaggaggttacggacaaggatctggaggaaacgcagcagctgctgcagctgccgctgccgccgctgcaagtggccagggaggacagggaggccaaggaggacagggacagggtggatacggtcaaggcgctggatcttcggctgctgctgcagctgcagctgctgcagccgcggcagccgctggacaaggtcaaggcggatacggacaaggtgcaggtggaaatgcagctgctgctgccgccgcagcagctgccgcagctgctggtcaaggtggacaaggtggacagggtggcttgggacaaggaggatatggtcaaggagctggtagctctgccgcagcggcagcagccgctgccgcagcagctgcagctgcaggaagaggacagggaggttatggtcaaggtgttggaggtaacgctgctgctgccgcagccgctgctgccgcggctgccgca

SEQ ID NO: 420 - DNA, 675 bp, synthetic construct
  misc_feature 1..675: note = Description of Artificial Sequence: Synthetic polynucleotide
  source 1..675: mol_type = other DNA
ggtcaaggtggtcagggtggacagggcggattgggccaaggaggttacggacaaggagcaggatcttccgcggctgcggcagctgcggccgccgctgccgccgcagctgctggcagaggtcaaggtggttatggtcagggatcaggtggaaacgcagccgctgcagcagctgccgctgctgctgccgcatctggacaaggttctcaaggaggacagggaggtcaaggtcagggaggatacggtcaaggtgctggttcctctgccgccgcagcagctgcggctgccgccgcggcagctgcttctggtagaggtcaaggaggttatggtcaaggagctggaggtaacgcagccgccgccgccgccgctgccgcagcagctgctgctgccggtcaaggtggtcaaggaggctatggtggcttgggtcagggaggttatggccagggcgcaggtagttctgctgcggccgctgccgcagccgcagcagcagctgctggaggtcagggcggacaaggccaaggaggttatggacaaggttctggaggttctgcagcagcagctgcagccgcagcagctgccgcagctgctgctgcaggaagaggacaaggtggatatggacaaggatctggtggaaatgcagcagcagcggctgctgctgccgctgcagcagccgctgca

SEQ ID NO: 421 - DNA, 657 bp, synthetic construct
  misc_feature 1..657: note = Description of Artificial Sequence: Synthetic polynucleotide
  source 1..657: mol_type = other DNA
ggtggacagggtggattttcaggacaaggacaaggaggatttggtcccggcgctggttctagcgctgctgcagcagccgcagcagccgctgctgcaagacaaggaggacaaggacagggcggatttggtcaaggagctggaggtaacgcagctgctgctgcagccgccgctgctgctgcagctgccgcccaacagggaggacagggtggcttttcaggtagaggtcaaggaggtttcggccctggtgctggatcgtccgctgcggctgctgcagctggacaaggtggacaaggccagggaggattcggtcaaggtgcaggtggtaacgcagctgccgccgccgccgctgcagccgctgccgccgctgcagctggtcagggaggtcaaggtagaggcggttttggtcaaggagccggtggtaatgccgcggcagcggccgcagccgccgctgccgctgctgccgccgctcaacagggtggtcaaggaggttttggaggacgaggccaaggaggattcggccctggagcaggttctagtgcggcagcagctgcagcaggacagggaggacaaggaagaggcggttttggacaaggtgcaggaggtaatgctgctgccgcttcagctgcagctgctgcttccgccgccgcagcaggtcaa

SEQ ID NO: 422 - DNA, 576 bp, synthetic construct
  misc_feature 1..576: note = Description of Artificial Sequence: Synthetic polynucleotide
  source 1..576: mol_type = other DNA
ggtggtcaaggaagaggtggttttggacaaggcgctggaggaaacgctgccgcagcagctgctgctgcagcagccgctgcggcagctcagcaggtaggccaattcggcttcggaggtagaggacaaggaggatttggacccttcgctggatcctcggcagccgctgctgctgctgcatccgctgctgcaggtcagggcggccagggtcaaggaggattcggccaaggtgccggtggtaatgcagctgcagctgctgcagcggctgcagcagcggctagacaaggaggtcaaggacagggaggattttctcaaggtgctggtggaaacgctgccgccgccgctgccgctgccgccgctgcagctgctgctgctcaacaaggtggccaaggaggatttggtggacgtggtcaaggtggttttggtccgggcgctggttcaagcgccgctgctgccgctgctgccactgctgctgctggtcagggaggtcagggtcgaggtggtttcggacaaggtgcaggttcaaacgccgccgctgcagcagctgcagctgcagcagcagcagctgctgcaggacaa

SEQ ID NO: 423 - DNA, 489 bp, synthetic construct
  misc_feature 1..489: note = Description of Artificial Sequence: Synthetic polynucleotide
  source 1..489: mol_type = other DNA
ggtcagggaggacaaggaggttacggaggtttaggccaaggaggttatggtcaaggagctggatcttctgctgccgcagctgccgctgccgcagctgcagcaggtagaggtcaaggtggttacggtcagggttccggaggaaatgccgctgcagcagccgcagcagctgctgcggcagcatccggtcagggaggtcaaggtggacaaggcggacagggccagggtggctacggacagggagccggatcatcagctgcagctgctgctgcagcagcagccgctgccgctgcagcggccggtagaggccagggtggttatggtcaaggtgctggaggaaacgctgccgcagccgctgctgctgctgccgctgctgcttcaggtcagggtggacaaggtggccagggaggacagggtcagggaggttacggtcagggcgccggctcctcagccgctgctgcggctgctgcagcagctgcagccgctgctgca

SEQ ID NO: 424 - DNA, 537 bp, synthetic construct
  misc_feature 1..537: note = Description of Artificial Sequence: Synthetic polynucleotide
  source 1..537: mol_type = other DNA
ggtcgtggtcaaggaggttatggtcagggttccggtggtaacgctgccgcggcagctgcagctggtcagggaggctttggtggtcaagagggaaatggtcaaggcgcgggaagtgcagcagcagctgccgcggcagccgctgctgcagctggtggctctggacaaggacgttacggaggtagaggtcagggcggttatggacaaggtgcgggagccgctgcctctgctgcagctgccgctgcagccgctgccgccggacaaggaggatttggtggtcaagaaggaaacggtcaaggtgcaggttcagctgctgccgcagctgcagctgctgctgccgccgcaggtggtagcggtcagggtggatatggtggtcgtggtcaaggtggatacggtcaaggcgctggagctgccgcagcagcagctgcagccgcagctgctgcagcagctggtcagggtggacagggtggtttcggatcgcaaggtggtaatggccaaggagctggttcagctgcagcggctgctgcagccgctgctgca

SEQ ID NO: 425 - DNA, 642 bp, synthetic construct
  misc_feature 1..642: note = Description of Artificial Sequence: Synthetic polynucleotide
  source 1..642: mol_type = other DNA
ggtggttacagacctgtttcaggacaacaaggcccaggtcagcaaggaccaggatcaggtggacaacaaggtcctggaggacaaagaccctacggaccaggtgctgctgctgcagctgccgctgcaggaggatatggtccgggaagtggacagggtggtccaggccagcagggcccaggctccggcggtcagcaaggtcctggtggccaaggaccatacggtcctggtgctgctgcggcagcagctgcagcagctggtggatatggtcccggttctggtcagggtggacaacaaggaccaggatcgcagggtccaggttctggcggtcagcaaggcccaggtggtcaaggcccatatggaccgtccgctgccgcggctgctgcagctgttggtggttacggtccaggcgctggtcaacagggtccaggtcaacaaggacctggatctggaggtcagagaggcccgggaggacaaggtccatatggaccaggcgctgctgcggccgctgccgcagctgcgggtggttatggtcctgcatcaggccaacagggccctggtcaacaaggtcctggttccggaggacaaagaggccctggtggtcaaggtccttatggaccaggtgccgccgccgctgcttccgca

SEQ ID NO: 426 - DNA, 540 bp, synthetic construct
  misc_feature 1..540: note = Description of Artificial Sequence: Synthetic polynucleotide
  source 1..540: mol_type = other DNA
ggtgcatcaggagccggtcaaggtcaaggttatggacagcaaggtcagggaggaagtagtgctgcagccgccgctgctgctgccgccgctgcagctgcggccgctcagggacaaggccagggttatggtcagcagggtcaaggttctgctgctgcagccgctgctgctgctgcggcgggtgcctctggcgctggtcaaggtcaaggatacggtcaacagggacaaggaagtgccgcagctgcagcagccgctgccgctgccggtgcaagtggagcaggtcaaggtcagggttacggacaacaaggtcaaggtggctcctctgctgctgctgcagcagctgctgctgccgctgcagccgctgcagcagcccaaggccaaggatatggtcaacaaggacaaggatcagctgcagccgccgcagctgcagctgctggagcatctggagctggacaaggtcaaggctacggccaacagggtcaaggcggctcttctgccgctgccgcagctgctgccgcggctgccgccgccgccgccgctgca

SEQ ID NO: 427 - DNA, 450 bp, synthetic construct
  misc_feature 1..450: note = Description of Artificial Sequence: Synthetic polynucleotide
  source 1..450: mol_type = other DNA
ggtgcttccggcgctggacaaggacagggttacggacaacaaggccaaggaggcagttctgctgctgcagctgctgcggctgccgctgcggcccaaggtcaaggacagggatacggtcagcagggtcagggctatggacagcaaggtcaaggcggttcgtctgccgcagctgcagctgccgctgctgccgctgctgcagcacagggtcagggccaaggttacggtcaacaaggacaaggatctgccgccgccgctgctgcagctgcagctggtgcttccggtgccggccaaggacaaggttacggtcagcaaggacaaggtggatccagtgctgccgctgccgctgctgctgctgctgcagcagcagccgccgcacagggtcaaggatatggacaacaaggacaaggttcagcggctgctgcagctgcggcagctgctgcagcagccgca

SEQ ID NO: 428 - DNA, 546 bp, synthetic construct
  misc_feature 1..546: note = Description of Artificial Sequence: Synthetic polynucleotide
  source 1..546: mol_type = other DNA
ggtgaggccttttctgcatcatccgctagttctgcagttgtgtttgaatctgcaggacctggtgaggaagccggtagttccggtgatggagcttctgctgctgcttcggccgctgctgccgcaggagcaggatcaggtagacgcggaccaggtggagctagatctagaggtggtgcaggtgctggcgccggtgcaggaagtggcgttggcggttacggatctggttctggcgcaggtgctggtgccggagctggcgctggagctggcggagaaggtggattcggagaaggtcaaggatatggagcgggtgccggagctggattcggatctggagcaggcgccggtgctggagccggttctggtgcaggtgcaggagaaggcgttggttctggagcaggtgctggtgctggagctggctttggagtaggtgcgggtgctggagcaggagctggtgctggattcggtagtggtgcaggtgccggttctggcgcgggtgctggatatggtgctggtagagccggaggcagaggtcgtggtggaagggga

SEQ ID NO: 429 - DNA, 546 bp, synthetic construct
  misc_feature 1..546: note = Description of Artificial Sequence: Synthetic polynucleotide
  source 1..546: mol_type = other DNA
ggtgaagctttctccgcttcatcggctagttcggctgttgtattcgaaagcgctggacctggtgaagaggccggttcttcaggtggaggagcttcagcggccgcatctgctgctgctgctgcaggagctggatctggtagaagaggtccgggtggagccagaagcagaggaggagctggtgctggtgcaggcgcgggatctggtgttggaggatatggatcgggcagcggagccggagctggcgctggtgccggtgccggtgccggaggtgaaggcggctttggtgagggtcaaggttacggcgctggtgcaggtgctggctttggttccggagctggagcgggagccggagcaggttccggtgcaggagctggagaaggagtaggtagcggtgcaggagcaggtgcgggtgctggctttggagtaggagccggtgccggagctggagcaggagctggttttggctcaggcgctggagctggatctggcgctggagcaggatacggtgctggccgtgctggaggaagaggacgtggaggcagagga

SEQ ID NO: 430 - DNA, 549 bp, synthetic construct
  misc_feature 1..549: note = Description of Artificial Sequence: Synthetic polynucleotide
  source 1..549: mol_type = other DNA
ggtagttacgcatacgcgcaggctgctgcaggtgctttcgcaaacgtcttgttccaagccggagttttaacctacgcaaatgcttctgcccttgctagcgcatatgcatcagcgtatgcctcttccgtcgcatcggcagctgcgtcagcttcggcaggagcatccgcttctagcggcgcttcggcatcagcttctgctgcagccgcagctgctgcagcggccgcagctagtgcctctgccggagcctcagcatcagcaggcgcgagtgcttcagcaggtgcttcagcgagtgcctcagcatcggccacagcatccgctttcgctagtgccttcgcatctgccgtagttcaaactggatacttttctaacgtgtttggtaatgtatattcggcagctcaagccagctattatgcttctgcgtccgcacaggctgctgcctccgctgctggttttggctcatctgtcgctaacgctgtggctagcgcttccgcttccgccgctggcggagtttcagttggagctggtgctcaagcttatgcctcagcttta

SEQ ID NO: 431 - DNA, 546 bp, synthetic construct
  misc_feature 1..546: note = Description of Artificial Sequence: Synthetic polynucleotide
  source 1..546: mol_type = other DNA
ggtaatggactcggtcaagctttattggcaaacggtgtattgaatagcggaaattacctacaactggcaaattctctagcttattcctttggatcctcgctatcccaatactctagtagtgctgcgggagcttctgcagccggtgccgcatcaggagccgctggtgctggtgcaggtgctgcctcctctggaggaagttctggatctgccagtagctcgaccacaactactacaactacctccacaagtgcggcagccgccgctgctgctgccgcagccgctgcatctgcagctgcatcaacctctgccagcgcttcagcttcggcctccgcctctgcttccgccttctctcagacttttgttcaaacagttctacaatctgctgcattcggatcttatttcggtggaaatctttccctgcaatcagcccaagctgctgccagcgcagctgctcaagccgcggcacaacaaattggcttaggatcatacggttatgccctagcaaatgctgttgcatccgcttttgcctccgcgggtgcgaacgca

SEQ ID NO: 432 - DNA, 549 bp, synthetic construct
  misc_feature 1..549: note = Description of Artificial Sequence: Synthetic polynucleotide
  source 1..549: mol_type = other DNA
ggttcctatgcttacgctcaggcggctgccggagcttttgccaacgtattgtttcaagctggtgtattgacatacgccaatgcttccgccctcgccagtgcctatgcaagtgcttatgctagctctgtagccagtgctgcagctagcgcttcagcaggagcctctgcatcttcaggagctagtgccagtgcaagtgcagcagcagctgcggccgctgcagctgctgcatcagcctcagccggtgcttcagcttcagccggcgcatctgcgtctgctggtgcgtccgcctctgccagtgccagtgctaccgcctctgctttcgcatcagcttttgccagcgctgtagtccaaactggatatttctctaatgtctttggcaacgtctactccgctgcacaggcctcctattacgcatctgcctcggcccaagctgccgctagtgctgctggattcggatctagtgtagctaacgccgttgctagtgcaagtgcttctgctgcaggaggagtatctgttggtgctggtgcacaggcttatgcttctgctcta

SEQ ID NO: 433 - DNA, 546 bp, synthetic construct
  misc_feature 1..546: note = Description of Artificial Sequence: Synthetic polynucleotide
  source 1..546: mol_type = other DNA
ggtaacggattgggacaggcattgctcgcaaacggcgtcttgaacagcggtaactaccttcaattggctaattccctggcttactcatttggatcaagtttgtctcagtactcttcatcggctgccggagcaagtgccgccggagctgcctccggtgccgctggtgctggagcgggagccgcttcatcaggaggatcttcaggttcggcttcatcatcaactactacgacaactactacatctacaagtgctgccgctgctgctgcagccgcagctgcagcagcctcagctgctgcctcgactagtgcttctgcctctgcatccgcttccgccagcgcgtctgccttcagtcaaacctttgtgcaaacggttttgcaatcagctgctttcggatcttacttcggtggtaacttgagtttgcaatctgcccaagctgctgctagcgcggccgcgcaggctgctgctcaacaaattggtttgggaagttacggctatgctctggcaaacgcagtggcttcagcttttgcgtcagctggcgctaacgca

SEQ ID NO: 434 - DNA, 549 bp, synthetic construct
  misc_feature 1..549: note = Description of Artificial Sequence: Synthetic polynucleotide
  source 1..549: mol_type = other DNA
ggttcatacgcctacgcgcaagctgcagccggtgcttttgcaaatgttttatttcaggctggtgttctgacttacgcaaatgcatccgctttagcaagtgcttatgcatcagcctatgcttcttcagttgcgtcggcggctgcaagcgcatctgcaggagcttcggcttcaagtggagcctctgcctctgcatcagcagctgcagctgctgcagccgctgctgccgcctcggcctctgctggagcctcagcctccgccggcgccagcgcaagtgctggagccagcgctagtgcctctgcaagtgcaactgcttctgcatttgcatctgcttttgcttccgccgtggttcaaactggctatttttctaacgtctttggtaatgtgtacagtgctgcacaagcttcatattacgcctcagcctcagctcaggccgctgcaagtgctgcgggtttcggtagttccgtagccaatgccgtggcatctgcttctgcctcagcggctggaggagtttccgtcggagccggagcacaagcttacgcatcggcttta

SEQ ID NO: 435 - DNA, 546 bp, synthetic construct
  misc_feature 1..546: note = Description of Artificial Sequence: Synthetic polynucleotide
  source 1..546: mol_type = other DNA
ggtaatggactaggacaagccctattagctaatggagttctgaactcaggtaactatttgcaacttgcaaacagccttgcgtactcttttggatcctcgctgtctcaatactcaagttctgctgcaggtgcttccgcagccggagccgcttccggtgctgccggagcaggtgcaggagccgcatcatcaggtggtagctctggaagtgcttcatcctcgaccaccactactacaactacctcaacctcagctgctgcagcagcagctgcggctgccgctgctgcttcggctgcagcttctacttctgcctcagcgtctgcttctgcatcagcttcagctagcgccttctcccaaacatttgttcagactgttttacaatcggccgcatttggttcatactttggaggaaatctgtctttgcagtcggctcaagcagcagcatcagcagccgcccaagcagccgcacaacaaattggattgggttcatatggttatgctttagctaacgccgtagcatctgccttcgcctccgccggcgcaaatgca

SEQ ID NO: 436 - DNA, 639 bp, synthetic construct
  misc_feature 1..639: note = Description of Artificial Sequence: Synthetic polynucleotide
  source 1..639: mol_type = other DNA
ggtggtgctggccaaggtggctacggcggacttggtggacaaggagctggccaaggtggttacggaggtttgggtggccagggagctggacagggagccggcgctgctgcagccgcggcagccggtggtgcaggacagggtggttacggtggtttaggttctcagggtgctggacgtggaggtcaaggagccggagctgcagctgcagctgccggaggtgctggacaaggaggctatggaggtttaggatcacaaggagccggaagaggaggccttggaggacaaggtgcaggagctgccgccgccgctgcggcaggaggtgcgggtcaaggaggttatggtggtctaggtaatcaaggtgccggaagaggcggtcaaggcgcagctgccgcagctgcaggtggtgctggtcaaggaggttacggtggactaggttctcagggcgctggtaggggaggattaggtggccaaggtgctggtgctgcagcggctgcagctggtggtgctggccagggaggatacggtggactaggaggacaaggcgctggccaaggaggctatggcggtcttggttctcaaggtgctggtcgaggaggactaggaggtcaaggtgccggagctgccgccgctgccgcagca

SEQ ID NO: 437 - DNA, 558 bp, synthetic construct
  misc_feature 1..558: note = Description of Artificial Sequence: Synthetic polynucleotide
  source 1..558: mol_type = other DNA
ggtggtgccggacaaggtggtctgggtggacaaggtgctggtcagggagccggcgcttccgctgccgctgctggtggagctggtcaaggcggatatggtggactgggatctcaaggagccggtagaggtggtgagggagcaggtgcggcagcagctgctgcaggcggcgcaggtcaaggcggatacggaggactgggaggtcaaggtgcaggacagggaggttacggaggattgggttctcaaggtgcaggaagaggtggtttgggaggacagggtgccggcgccgccgcggcaggtggtgccggtcaaggaggtcttggaggtcagggcgctggacaaggtgccggagctgcggccgccgccgctggaggcgccggacaaggaggctatggtggtttaggttcacaaggtgctggtagaggaggattgggtggtcaaggtgctggtgctgttgccgctgcagcagccggcggtgcaggacaaggtggttatggtggtttaggatctcaaggagcaggtcgtggcggtcagggtgcaggagcagctgccgctgcggca

SEQ ID NO: 438 - DNA, 564 bp, synthetic construct
  misc_feature 1..564: note = Description of Artificial Sequence: Synthetic polynucleotide
  source 1..564: mol_type = other DNA
ggtggtgcaggtcaaagaggttatggaggactaggtaatcaaggagctggtcgcggaggattaggaggtcaaggagctggtgctgccgccgctgctgctgctggaggtgcaggacagggtggatacggtggtcttggtaatcagggagcaggtcgaggtggacagggcgccgcggctgccgctggtggagccggacaaggtggttatggtggcttaggtagtcaaggtgctggtagaggaggtcagggagctggagctgctgccgccgcagcagtaggagctggtcaagaaggtatcagaggacaaggagctggtcagggtggttatggaggcttaggatctcagggtagcggtagaggaggattaggtggtcaaggagcaggtgctgccgctgccgctgctggtggagctggacaaggtggtttaggtggtcaaggtgcaggccagggagccggtgccgctgcggcagctgctggtggtgttagacagggaggctatggtggcttaggatcccagggtgctggccgaggtggtcagggagcaggtgctgcagcagccgctgca

SEQ ID NO: 439 - DNA, 648 bp, synthetic construct
  misc_feature 1..648: note = Description of Artificial Sequence: Synthetic polynucleotide
  source 1..648: mol_type = other DNA
ggtcccggtggctatggacctggtcaacagggtcctggaggttatggtcccggtcaacaaggacctggaagatacggtccaggtcaacaaggaccatcaggtccaggaagtgcagccgcggctgctgctggttccggacaacagggacctggcggctacggaccacgtcaacagggtcccggtggttatggtcaaggccaacaaggtccatctggtccaggctcagctgcagcagcatctgctgcagccagcgctgagtcaggtcaacaaggtcccggtggatatggtccaggacaacaaggccctggtggatatggaccaggtcaacagggtccaggcggatacggccctggccagcaaggaccgtccggaccaggttctgcggccgctgcggctgcagctgcctcaggtcctggtcagcaaggtccaggaggctatggtcctggacagcaaggtccgggaggatatggacctggacaacaaggaccttctggacctggctctgctgcagcggctgctgccgcggcgtcgggtccaggacaacagggccctggaggatacggtccaggacagcaaggtccaggtggttatggtcctggtcagcagggactgtctggtcctggatctgctgctgctgcagcagctgca

SEQ ID NO: 440 - DNA, 636 bp, synthetic construct
  misc_feature 1..636: note = Description of Artificial Sequence: Synthetic polynucleotide
  source 1..636: mol_type = other DNA
ggtcctggacaacaaggccctggcggatatggaccgggtcaacaaggaccatccggacctggttccgcagctgctgccgccgctgcagctgctggtcctggaggatacggtcctggtcagcaaggtcctggaggctacggaccaggacaacagggtccatccggagctggttctgcagctgctgctgcagctgcaggccctggacaacaaggattaggtggttacggaccaggacagcagggacctggtggatacggtccgggacaacaaggtccaggtggttatggacctggttctgcatctgccgctgccgccgctgctggtccaggccaacaaggacccggtggatacggccctggtcagcagggaccttccggtccaggatcggcttccgccgctgctgctgcggcggctgccggtccaggaggttatggtccaggtcagcaaggtccgggaggttatgcaccaggacaacaaggtccttccggtcctggttccgcttccgctgccgcagctgctgctgccgctggtccaggtggatacggacctggtcaacaaggacctggaggctatgctcccggtcagcaaggtccatccggtcctggatctgccgcggctgctgccgcagccgccgca

SEQ ID NO: 441 - DNA, 624 bp, synthetic construct
  misc_feature 1..624: note = Description of Artificial Sequence: Synthetic polynucleotide
  source 1..624: mol_type = other DNA
ggtcgaggacccgaaggatatggacctaggcaacaaggtcccggagctacggctgctgctgctggacctggtggatacggcccacgacaacagggaccaggaggatatggaccaggtcagcagggaccaggtgcagcagctgccgccgctgccggtagaggaccaggtggatacggtccaggtcaacaaggaccaggtggtccaggagctgctgctgcagctgctggtagtgaaggatacggacctggtcagcaaggtcctagaggcccaggagctgctgcagctggacctggaggatacggtcctggacaacagggtgcatcagctgcagcttccgcagctgcaggaagaggacctggtggatatggacctggacagcaaggacctggaggacctagtgctgccgcagccggtcctggtggttacggtcctggtcagcaaggaccaagtgctgcagcagctgctgctgctggttctggtcctggcggttacggaccaggccagcaaggtccaggaggtcctggtgctgcagctgccgccgcgggaccaggcggatacggtccaggacaacagggtcccggtgctgcagcagcagccgccggacaagcagcggccgcggcagca

SEQ ID NO: 442 - DNA, 675 bp, synthetic construct
  misc_feature 1..675: note = Description of Artificial Sequence: Synthetic polynucleotide
  source 1..675: mol_type = other DNA
ggtagaggaccaggaggttatggtccaggtcagcagggaccgggtggacctggagcagctgcagcggctgccggtcccggaggttatggaccaggtggttacggtccaggtcaacaaggtcctggtggtccaggagccgctgccgctgctgccgccggccgcggtccaggtggttatggtccaggacaacaaggtcctggccaacaaggcccaggtggttccggtgctgcagctgcagctgcgggaagaggtccaggtggatacggaccgggtcaacaaggccctggtggaccaggtgccgccgccgctgctgctggtccaggtggatatggtcctggtcagcagggacctggtgctgctgcagcagccgccgcagctggtagaggtcccggtggatatggtccgggccagcagggaccaggaggccctggtgccgcagctgctgctgccgctggacgtggaccgggtggatacggtcctggtcagcaaggaccaggtcaacagggtccaggcggttccggtgcagctgccgctgccgctggaagaggaccaggcggatatggtcctggacaacaaggacctggaggacctggtgccgccgcagcagctgcaggtcctggaggatatggacctggtcaacaaggaccaggagcagcagcagccgccgccgctgca

SEQ ID NO: 443 - DNA, 675 bp, synthetic construct
  misc_feature 1..675: note = Description of Artificial Sequence: Synthetic polynucleotide
  source 1..675: mol_type = other DNA
ggtcgtggtccgggaggatacggtccaggacagcaaggtccgggtggatctggcgccgcagcagctgctgctggaagaggtccaggaggttatggtccaggacagcagggaccaggtggtccaggagcagctgcagccgctgctggtcctggtggttacggtccaggacaacaaggcacgggtgctgcggctgccgcagcagctggttctggtgccggaggttacggtcctggacagcagggcccaggtggtcctggtgctgccgcagcagcagctggacctggaggatacggccccggacagcaaggcccaggtgcagcagccgctgccgctgctggaagtggtccaggcggatatggtccaggtcaacaaggtcctggtggttcttctgctgccgccgcagccgcaggtccaggtagatacggaccgggtcagcaaggtccaggtgcagccgctgctgcttctgctggccgtggtccaggaggttacggtccgggccaacaaggtccaggcggtcctggtgccgctgctgcagctgccggtcctggaggttatggccctggtcaacaaggccctggagccgctgctgccgctgctgcaggatcaggtccaggcggatacggacctggtcagcaaggtcccggaggtccaggagctgcagctgccgcagctgca

SEQ ID NO: 444 - DNA, 648 bp, synthetic construct
  misc_feature 1..648: note = Description of Artificial Sequence: Synthetic polynucleotide
  source 1..648: mol_type = other DNA
ggtcgtggtcctggtggctatggacaaggtcagcaaggacccggcggacctggcgcagcagctgccgcggccggtccaggtggttatggacctggacaacaaggacctggagcagcagcagctgcagccgctggatctggccctggtggatatggacctggtcagcaaggaccaggacgttcaggtgcagctgctgcagcagccgcagctggtcgtggtccaggtggatatggtccaggacagcagggcccaggaggccctggtgccgcagcggccgctgccggtcctggtggttatggtccaggccaacaaggtcctggtgcagctgcagcagctagtgctggtcgaggacctggtggatatggtcctggacaacaaggtccgggtggatccggagccgctgctgctgcagccggtagaggtcccggtggatacggtccgggtcaacaaggtccaggtggtcctggagctgctgctgcagctgccgctggccgtggtccaggtggctacggaccaggtcaacaaggccctggtcagcagggtcctggaggaagcggtgctgcggctgccgccgctggtcgtggccctggcggatacggtccaggtcaacagggaccaggtggtccaggtgctgctgctgctgccgca

SEQ ID NO: 445 - DNA, 672 bp, synthetic construct
  misc_feature 1..672: note = Description of Artificial Sequence: Synthetic polynucleotide
  source 1..672: mol_type = other DNA
ggtcctggaggttatggtcctggtcaacaaaggccaggacaacagggccctggaggtccaggagccgctgccgctgcagcaggtcgcggtcctggaggatatggtcctggacagcaaggccctggaggtcctggtgccgctgcggcagctgcagccggaaggggacctggtggatacggacctggacaacaaggacctggtcaacaaggtccaggcggttcaggtgctgcagcagctgcagctggccgaggacccggcggatatggaccaggtcagcagggaccaggaggacctggcgccgctgccgctgctgcaggacctggaggatacggaccaggacaacaaggtcctggtgctgctgctgccgccgctgcagcaggaagaggaccgggtggatatggaccgggacaacaaggtccaggaggaccaggagcggcagcggctgcagcagctggaagaggccctggcggttatggtcccggtcagcaaggacctggtcagcagggtccaggtggtccgggtgccgctgcagcagcagccggacctggtggttatggaccgggtcaacaaggtaccggagctgctgctgctgcggctgccggttcgggagctggtggatatggaccaggacagcaaggtcctggaggccctggagcagctgcagcagctgca

SEQ ID NO: 446 - DNA, 609 bp, synthetic construct
  misc_feature 1..609: note = Description of Artificial Sequence: Synthetic polynucleotide
  source 1..609: mol_type = other DNA
ggtccaggcggttacggtccaggacaacagggaccgggcgctgcagctgctgctgcagctggttctggtcctggtggttacggacctggccagcagggacctggcggaagcagcgctgccgctgccgctgccggacctggaagatacggtccaggtcaacaaggtccgggtgctgccgctgcagcagctgctggatcaggtccaggtggttatggtccaggtcagcaaggtccaggtggtcctggagcagctgccgctgctgccgctgccggtagaggtccaggaggatacggacctggtcaacagggacctggtggtccgggagctgctgcagccgctgctggacctggaggttatggaccaggacagcaaggacctggtgccgccgctgctgctgctgctggtagcggtccaggcggatatggtcctggtcagcaaggtccgggtggaccaggcgcagctgccgcagctgccgcgggaaggggacctggcggttacggtcaaggccagcaaggaccaggaggacctggagctgccgcagcagctgcaggtcctggtggatatggtcctggacagcagggtccaggtgctgctgctgctgcagcagca

SEQ ID NO: 447 - DNA, 561 bp, synthetic construct
  misc_feature 1..561: note = Description of Artificial Sequence: Synthetic polynucleotide
  source 1..561: mol_type = other DNA
ggttcaggaccgggaggttatggtccaggtcaacagggacccggtcgatctggtgctgcagcagcggctgcagctgcaggcagaggtcccggtggatatggtccaggccagcaaggacctggtggtcctggtgccgcagctgctgccgcaggaccaggtggttatggacctggccaacaaggtccaggtgctgccgccgctgcttcagccggtagaggaccgggtggttacggaccaggtcagcagggacctggaggttcaggtgcagctgcagcagctgctggacgtggccctggaggttatggaccaggacagcaaggcccaggcggaccaggagcagctgctgctgccgctgctggtactggaccaggaggatatggtccaggtcagcaaggtcctggaggctccggtgctgctgccgcagcggctggtaggggtccaggtggttacggacctggacaacaaggaccaggtggtcctggagctgcagcggctgcggctggcccaggaggatatggaccaggtcaacaaggacctggcgctgctgctgctgcggcagca

SEQ ID NO: 448 - DNA, 522 bp, synthetic construct
  misc_feature 1..522: note = Description of Artificial Sequence: Synthetic polynucleotide
  source 1..522: mol_type = other DNA
ggtagcggaccaggaggttacggaccaggccaacagggaccaggtggaccgggcgctgcagccgccgccgctggaagaggaccaggtggttatggtcctggtcagcagggaccaggtggtccaggtgcggccgctgctgctgccgcaggacgaggacctggaggatacggtcctggccagcaaggacctggtggttccggtgctgccgctgccgctagtggtaggggtccaggtggtagtggtcctggtggatacggtcccggtcaacagggaccaggagcagccgctgctgctgctgctgcaggtagaggtcctggaggttacggacctggtcagcaaggacctggaggtccaggtgctgccgctgctgccgcagccggtagaggtccgggaggatatggtcctggacaacaaggtcctggtggttctggagccgccgctgctgccgctggaagaggtcctggtggctatggtcccggtcaacaaggacctggcggacctggtgctgcagctgccgcagca

SEQ ID NO: 449 - DNA, 468 bp, synthetic construct
  misc_feature 1..468: note = Description of Artificial Sequence: Synthetic polynucleotide
  source 1..468: mol_type = other DNA
ggtccaggaggttatggtcccggtcaacaaggtcctggagccgctgccgctgcagcaggtagaggacctggcggctatggacctggacaacagggcccaggcggttctggagctgccgcagctgccgcgggaagaggtccaggtggttatggtccaggacaacaaggacctggtggtcctggagctgccgctgcagctgcaggtcccggcggatacggaccaggacagcagggtaccggtgctgctgctgccgcggccgctggttctggtgccggtggttatggtcctggtcaacaaggaccaggaggtcctggagctgctgctgcagctgctggaccgggtggctatggaccaggccagcaaggccctggtgccgccgccgctgctgccgcaggtagtggcccaggcggttatggtccaggtcaacagggacctggtggacctggtgctgctgccgcagcagctgca

SEQ ID NO: 450 - DNA, 525 bp, synthetic construct
  misc_feature 1..525: note = Description of Artificial Sequence: Synthetic polynucleotide
  source 1..525: mol_type = other DNA
ggtggtgccggtcaaggaggttactctggacttgatagacagagatctggcgccgctgccgctggagcatcagtggcagctcagggtggttacggtggtcttggaggccaaggagccggtgcagctggcgctgctgccgcaggtggtgctggtaggggtggatatggtggtttggttggtcaaggagctggtgctgctgctgctggtgctggagaagccggacagggaggctatggatctttgggtggacaaggtaccggtgcaggtggcgaggctgctgctgcaactggaggcgctggtcagggcggttacggtggactaggtggccaaggtgcttctgcagccggatcagccggtcaaggtggttatggtggattggccggacaaagagcaggagctgctgccactggcggtttgtttgatggatctagagatgttggtggtttctcattcgcagtttctggttcttcaggtggctaccgtagaggaggttacgttggtaatagcacagccgctgcagctgca

SEQ ID NO: 451 - DNA, 531 bp, synthetic construct
  misc_feature 1..531: note = Description of Artificial Sequence: Synthetic polynucleotide
  source 1..531: mol_type = other DNA
ggtggtgcgggtcaaggcggttacggaggattaggaggtcaaggagccggtgctgctgctgccgctgcaggaggagccggacagggaggttacggtggtcaaggtgccggacaaggagcggctgccgctgcagcatcaggtgctggtcaaggaggctatgaaggtcctggtgcaggacaaggagctggtgctgcagctgccgcagccggtggtgccggccagggaggatatggtggtttgggcggacagggcgccggccaaggagctggtgcagccgcagccgccgctggcggtgccggacaaggtggttacggtggtcttggtggtcagggagcaggtcagggtgcaggagccgctgctgctgctgctggaggagctggtcaaggcggatatggaggtcaaggcgcaggtcaaggcgcagcagcagcagccgctggtggagccggacagggtggttacggcggcctaggttcaggacaaggaggttatggacgtcagggagctggtgccgcagccgcagcggccgctgca

SEQ ID NO: 452 - DNA, 522 bp, synthetic construct
  misc_feature 1..522: note = Description of Artificial Sequence: Synthetic polynucleotide
  source 1..522: mol_type = other DNA
ggtggagcaggccaaggtggatacggcggtttgggcggccaaggtgctggcgccgctgctgcagctgctggtggagctggacaaggaggatacggtggtcaaggagccggtcaaggcgctgctgctgcagcagcctctggagccggacagggtggatatggcggtccgggcgccggtcagggcgcaggtgctgcagccgctgcagctggcggagctggtcagggcggttacggtggactcggtggacaaggagctggccagggagccggtgctgctgcagccgccgcaggtggagctggccaaggtggttacggaggtcaaggcgccggacaaggtgctgccgcagctgctgctggtggtgctggacaaggtggttacggtggtttaggatccggtcaaggtggatatggtggtcaaggtgccggagcagcagccgcagctggcggagccggacagggaggatatggaggtttgggtggacaaggcgctggccaaggagcaggtgcagcagccgccgctgca

SEQ ID NO: 453 - DNA, 444 bp, synthetic construct
  misc_feature 1..444: note = Description of Artificial Sequence: Synthetic polynucleotide
  source 1..444: mol_type = other DNA
ggtggctacggtcctggtagcggtcagcaaggcccaggcgctggtcaacaaggtcctggtgcaggacagcagggaccatatggaccatctgctgcagcagcagcggctgctgctggcggttacggccctggaggagctggtcagcagggaccaggtgccggtcaacaaggacctggatcacagggtcagtccggtcctggtgccactgtcgctgctgctgctgccggaggatatggcccaggtggtgccggacagcaaggtcctggagctggacaacaaggtcagggatctcaaggaccttatggaccagcggctaccgccgctgccgctgctgctggtggttacggaccaggaagtggccagcaaggtccaggagccggtcaacaaggtccaggaggacaaggaccatatggtccatctgccgctgcagctgctgctgccgca

SEQ ID NO: 454 - DNA, 438 bp, synthetic construct
  misc_feature 1..438: note = Description of Artificial Sequence: Synthetic polynucleotide
  source 1..438: mol_type = other DNA
ggtggatatggtcctggtagtggacaacaaggacctggagccggtcctcaaggaccaggttctcagggtccgtatggtcctggagcagccgctgccgctgcagctgtgggtggctacggtcctggatctggtcaacagggaccaggtgcaggtcaacaaggtccaggcggacaaggcccatacggaccaagttctgcagcggccgctgctgcagccggtggatacggtccaggaggagcaggtcagcaagtaccaggtgccggccaacagggtccaggaaatcagggtccatcaggacctggagctgcagcagctgctgctgctgccggaggttacggccctggaggtgctggtcaacagggcccagctgcaggccaacagggacctggctcacaaggatcgtatggaccgggtgctgcagccgctgcagctgctgca

SEQ ID NO: 455 - DNA, 579 bp, synthetic construct
  misc_feature 1..579: note = Description of Artificial Sequence: Synthetic polynucleotide
  source 1..579: mol_type = other DNA
ggtggtcttggaggtcagggaggtctgggtggactaggtagtcaaggagctggtttgggcggctatggtcaaggtggtgctggccaaggaggagctgcagcagctgctgctgccgccggtggtttaggaggacaaggaggtagaggaggtttaggctcccaaggtgcaggccaaggaggttatggtcagggaggagctggccaaggaggtgctgctgccgcagctgcagcggccggtggactaggaggtcaaggtggactgggagcccttggaagccagggtgccggccaaggtggcgctggtcagggtggttacggacaaggaggcgcagccgcagctgctgctggaggcctcggaggtcagggtggtctaggaggattgggttctcagggagccggacaaggtggatatggccaaggtggcgccggtcaaggaggagctgccgctgctgcagcagcagctggtggtttaggtggtcaaggcggtctgggcggtttaggttcccaaggagccggtccgggaggttatggacaaggtggtgcaggtcaaggtggagcagctgccgccgctgccgcggca

SEQ ID NO: 456 - DNA, 498 bp, synthetic construct
  misc_feature 1..498: note = Description of Artificial Sequence: Synthetic polynucleotide
  source 1..498: mol_type = other DNA
ggtggtttgggcggtcaaggtggtttaggcgctcttggcagtcaaggtgctggtcaaggcggctatggacagggtggagctggccaaggtggtgctgcagccgcagctgccgctggtggactaggtggtcaaggcggacttggtgctttaggtagtcaaggtgccggacaaggtggttacggccaaggaggttcacaaggtgccggccagggtggttatggacaaggtggcgctgctgcagccgccgctgctgcaggtggcctcggtggtcaaggtggacttggtggactaggaagtcagggagccggacaaggaggttacggacagggtggtagccagggtgctggacaaggaggtgcagctgctgctgctgctgcagctggtggtctgggaggtcagggaggcttcggtggtcttggatctcagggcgccggacagggtggctatggacaaggtggagcaggacaaggtggtgctgctgccgccgctgcggcagca

SEQ ID NO: 457 - DNA, 723 bp, synthetic construct
  misc_feature 1..723: note = Description of Artificial Sequence: Synthetic polynucleotide
  source 1..723: mol_type = other DNA
ggtgcaggagctggtcagggcggacgaggcggctacggtcaaggaggatttggaggacaaggctccggtgcaggtgctggtgcaagcgcagctgcaggtgcaggagctggccaaggtggaagaggaggttacggacagggtggtttcggtggtcaaggttccggtgccggagctggagcttccgctgcagctggagctggtgctggtcaaggaggtagaggaggctacggacaaggcggttttggcggacaaggttcaggtgccggtgctggcgctagcgccgcagctgctgccggtgcaggacaaggtggaagaggcggttacggtcaaggtggacttggtggttcaggatctggtgctggagccggtgctggtgctgctgccgccgcagctgctggcgcaggaggttatggacaaggtggattaggtggttacggccaaggcgccggcgctggacagggcggcctcggaggttacggatcaggagcaggagccggtgcctcagccgctgcggctgcaggtgccggaggtgctggacaaggaggtttgggtggttatggtcagggcgcaggtgccggtcaaggtggtctgggtggttatggcagcggtgctggtgcaggagcagcagccgctgccgcagccggagccggaggctctggtcaaggaggactcggtggttatggctctggaggtggagctggaggagcaagtgccgctgctgca

SEQ ID NO: 458 - DNA, 498 bp, synthetic construct
  misc_feature 1..498: note = Description of Artificial Sequence: Synthetic polynucleotide
  source 1..498: mol_type = other DNA
ggtgcgtctgattcagcagcagctgcagctttatctgctgctagcgcaagtgcagcatctgccgcgacagctgttagtactacaacatcaacttccacgtcagcagctactgccgccgcagctgccgcttctgctgcaggcgctgctggcgcaggagctgccgccggtgcaactgcctcaagctccttcggccaaaatttgctttccggcttgctgagatccgacgccgtcgtctccgccctttcacaggcttattctgcatcaactgcatccgccctagcatcatcttacgctcaatcaggagctgatcgtgctggattcggcaattatggatctgtgattgctagcgccgcggctagcgctgttgcttctgcaggaaacaacgctggtgcctatgcctatgcaagagcctatgcatcagctatctcacaatctctttcaagccttggaattcttaattcaggtaatgcaattgctttggccaacgctttcagttca

SEQ ID NO: 459 - DNA, 498 bp, synthetic construct
  misc_feature 1..498: note = Description of Artificial Sequence: Synthetic polynucleotide
  source 1..498: mol_type = other DNA
ggtgcttctgattcggctgcggctgctgctgtttctgccgcttctgcttctgcggcatccgcagccactgcgagtagtaggacgacgagtacttcaacttcagctgctactgcagctgctgccgctgctagtgctgcaggctcagcaggtgcgggagcagctgcaggagctaccgccagtagttccttcggtcaaaatttgctgtctggactgctccgtagtgacgcagtggtgagtgcactatcacaagcctattcggcttctactgcaagcgcactagcttcctcttacgctcaatccggtgccgatcgtgccggtttaggtaattatggaagtgtgattgcctctgccgcagccagtgccgttgcgtcagctggtaataacgctggagcgtatgcttacgctcgcgcatacgcctcggctatatctcaaagtttgagctcgctgcgaattctaaactctggaaacgccattgccctagcaaatgcattctcatca

SEQ ID NO: 460 - DNA, 498 bp, synthetic construct
  misc_feature 1..498: note = Description of Artificial Sequence: Synthetic polynucleotide
  source 1..498: mol_type = other DNA
ggtgcttcagactcggctgcagctgctgctttgagtgctgcctcggcaagtgcagctagcgctgctactgctgcttctactactactagcacatcgacttctgcggcaacagctgcagcagcagctgcatcagccgccggagctgctggtgcgggtgcagcggctggtgctacagccagttcttcatttggacaaaacctactcagtggattgttaagatcggacgccgtcgtgtccgctctttcccaggcatattcggcaagtacagcttctgccctcgcatcatcctatgctcagagtggtgctgatagagcaggcctaggtaactacggatcagtgatcgctagtgctgctgcctctgctgttgcttctgctggtaataatgctggtgcttacgcgtatgctagagcttatgcatccgccatcagccagtcattgtcatcactcggtattctaaactctggaaatgctatcgcactagctaacgcttttacttca

SEQ ID NO: 461 - DNA, 522 bp, synthetic construct
  misc_feature 1..522: note = Description of Artificial Sequence: Synthetic polynucleotide
  source 1..522: mol_type = other DNA
ggtggattgggtggtggacagggtgcaggtcaaggtggacagcaaggcgctggacaaggtggctatggtagcggactgggtggtgccggccaaggagctggacaaggagctagtgcagctgctgccgctgctgccggtggtctaggtggaggtcagggtgcaggccaaggtggtcaacaaggtgctggacagggaggttatggatctggactcggaggtgctggtcaaggcgcttcagccgctgcagctgccgccgcagccggtggattaggtggaggccagggtgccggacaaggaggacaacaaggagcaggacagggaggatacggttcaggtctaggtggagctggacaaggtgcttcagctgctgcagctgctgctgcagctggtggtttgggtggaggtcagggagcaggccaaggaggccagcaaggtgctggtcagggtggttacggatcaggtttgggaggcgctggtcaaggagcaggtcaaggtgctagtgcggccgctgctgctgccgca

SEQ ID NO: 462 - DNA, 531 bp, synthetic construct
  misc_feature 1..531: note = Description of Artificial Sequence: Synthetic polynucleotide
  source 1..531: mol_type = other DNA
ggtggttctggaggtcaaggaggacagggcggttatggatccggaggtcaaggtcagggacaaggtggttatggaagcggagccgctgcagccgcagctgccgcagctggaggatcaggtggtcaaggtggtcagggaggttacggatctggcggacagggtcaaggtcagggtggttacggcgcaggtgctgcagcagcggctgcagccgccgcaggtggttccggtggtcaaggcggagccggtgctggtggccaaggcggacaaggtcaaggacagggtggttatggttctggagccgctgctgccgctgcagccgctgctggtggactcggaggacaaggtggatacggttctggtagacaaggtcagggtcaaggtggttacggctcaggtgcggccgccgctgcagctgcggctgctggtggcagcggaggtcagggtgcccaaggtggatacggatccggtggtcaaggacaaggtcagggaggatatggttccggtgccgctgctgctgccgccgctgccgca

SEQ ID NO: 463 - DNA, 567 bp, synthetic construct
  misc_feature 1..567: note = Description of Artificial Sequence: Synthetic polynucleotide
  source 1..567: mol_type = other DNA
ggtggttacggtccaggcgctggtcaacaaggtccaggaagtggtggtcaacaaggacctggcggtcaaggaccctacggtagtggccaacaaggtccaggtggagcaggacagcagggtccgggaggccaaggaccttacggaccaggtgctgctgctgccgccgctgccgctgccggaggttacggtccaggagccggacaacagggtccaggtggagctggacaacaaggtccaggatcacaaggtcctggtggacaaggtccatacggtcctggtgctggtcaacagggaccaggtagtcaaggacctggttcaggtggtcagcagggtccaggaggacagggtccttacggcccttctgccgctgcagcagcagccgctgccgcaggaggatacggacctggtgctggacaacgatctcaaggaccaggaggacaaggtccttatggacctggcgctggccaacaaggacctggttctcagggtccaggttcaggaggccaacaaggcccaggaggtcaaggaccatacggaccatccgctgcggcagctgcagctgctgca

SEQ ID NO: 464 - DNA, 378 bp, synthetic construct
  misc_feature 1..378: note = Description of Artificial Sequence: Synthetic polynucleotide
  source 1..378: mol_type = other DNA
ggtggatatggcccaggagccggacaacagggtcctggttcacaaggtccaggatctggtggtcaacagggaccaggcggccagggaccttatggtccaggagccgctgcagcagcagcagctgttggaggttacggccctggtgccggtcaacaaggcccaggatctcagggtcctggatctggaggacaacaaggtcctggaggtcagggtccatacggaccttcagcagcagctgctgctgcagccgctggtggttatggacctggtgctggtcaacaaggaccgggttctcagggtccgggttcaggaggtcagcagggccctggtggacaaggaccttatggacctagtgcggctgcagcagctgccgccgca

SEQ ID NO: 465 - DNA, 945 bp, synthetic construct
  misc_feature 1..945: note = Description of Artificial Sequence: Synthetic polynucleotide
  source 1..945: mol_type = other DNA
ggtggttacggtccaggcgctggtcaacaaggtccaggaagtggtggtcaacaaggacctggcggtcaaggaccctacggtagtggccaacaaggtccaggtggagcaggacagcagggtccgggaggccaaggaccttacggaccaggtgctgctgctgccgccgctgccgctgccggaggttacggtccaggagccggacaacagggtccaggtggagctggacaacaaggtccaggatcacaaggtcctggtggacaaggtccatacggtcctggtgctggtcaacagggaccaggtagtcaaggacctggttcaggtggtcagcagggtccaggaggacagggtccttacggcccttctgccgctgcagcagcagccgctgccgcaggaggatacggacctggtgctggacaacgatctcaaggaccaggaggacaaggtccttatggacctggcgctggccaacaaggacctggttctcagggtccaggttcaggaggccaacaaggcccaggaggtcaaggaccatacggaccatccgctgcggcagctgcagctgctgcaggtggatatggcccaggagccggacaacagggtcctggttcacaaggtccaggatctggtggtcaacagggaccaggcggccagggaccttatggtccaggagccgctgcagcagcagcagctgttggaggttacggccctggtgccggtcaacaaggcccaggatctcagggtcctggatctggaggacaacaaggtcctggaggtcagggtccatacggaccttcagcagcagctgctgctgcagccgctggtggttatggacctggtgctggtcaacaaggaccgggttctcagggtccgggttcaggaggtcagcagggccctggtggacaaggaccttatggacctagtgcggctgcagcagctgccgccgca

SEQ ID NO: 466 - DNA, 1890 bp, synthetic construct
  misc_feature 1..1890: note = Description of Artificial Sequence: Synthetic polynucleotide
  source 1..1890: mol_type = other DNA
ggtggttacggtccaggcgctggtcaacaaggtccaggaagtggtggtcaacaaggacctggcggtcaaggaccctacggtagtggccaacaaggtccaggtggagcaggacagcagggtccgggaggccaaggaccttacggaccaggtgctgctgctgccgccgctgccgctgccggaggttacggtccaggagccggacaacagggtccaggtggagctggacaacaaggtccaggatcacaaggtcctggtggacaaggtccatacggtcctggtgctggtcaacagggaccaggtagtcaaggacctggttcaggtggtcagcagggtccaggaggacagggtccttacggcccttctgccgctgcagcagcagccgctgccgcaggaggatacggacctggtgctggacaacgatctcaaggaccaggaggacaaggtccttatggacctggcgctggccaacaaggacctggttctcagggtccaggttcaggaggccaacaaggcccaggaggtcaaggaccatacggaccatccgctgcggcagctgcagctgctgcaggtggatatggcccaggagccggacaacagggtcctggttcacaaggtccaggatctggtggtcaacagggaccaggcggccagggaccttatggtccaggagccgctgcagcagcagcagctgttggaggttacggccctggtgccggtcaacaaggcccaggatctcagggtcctggatctggaggacaacaaggtcctggaggtcagggtccatacggaccttcagcagcagctgctgctgcagccgctggtggttatggacctggtgctggtcaacaaggaccgggttctcagggtccgggttcaggaggtcagcagggccctggtggacaaggaccttatggacctagtgcggctgcagcagctgccgccgcaggtggttacggtccaggcgctggtcaacaaggtccaggaagtggtggtcaacaaggacctggcggtcaaggaccctacggtagtggccaacaaggtccaggtggagcaggacagcagggtccgggaggccaaggaccttacggaccaggtgctgctgctgccgccgctgccgctgccggaggttacggtccaggagccggacaacagggtccaggtggagctggacaacaaggtccaggatcacaaggtcctggtggacaaggtccatacggtcctggtgctggtcaacagggaccaggtagtcaaggacctggttcaggtggtcagcagggtccaggaggacagggtccttacggcccttctgccgctgcagcagcagccgctgccgcaggaggatacggacctggtgctggacaacgatctcaaggaccaggaggacaaggtccttatggacctggcgctggccaacaaggacctggttctcagggtccaggttcaggaggccaacaaggcccaggaggtcaaggaccatacggaccatccgctgcggcagctgcagctgctgcaggtggatatggcccaggagccggacaacagggtcctggttcacaaggtccaggatctggtggtcaacagggaccaggcggccagggaccttatggtccaggagccgctgcagcagcagcagctgttggaggttacggccctggtgccggtcaacaaggcccaggatctcagggtcctggatctggaggacaacaaggtcctggaggtcagggtccatacggaccttcagcagcagctgctgctgcagccgctggtggttatggacctggtgctggtcaacaaggaccgggttctcagggtccgggttcaggaggtcagcagggccctggtggacaaggaccttatggacctagtgcggctgcagcagctgccgccgca

SEQ ID NO: 467 - DNA, 2835 bp, synthetic construct
  misc_feature 1..2835: note = Description of Artificial Sequence: Synthetic polynucleotide
  source 1..2835: mol_type = other DNA
ggtggttacggtccaggcgctggtcaacaaggtccaggaagtggtggtcaacaaggacctggcggtcaaggaccctacggtagtggccaacaaggtccaggtggagcaggacagcagggtccgggaggccaaggaccttacggaccaggtgctgctgctgccgccgctgccgctgccggaggttacggtccaggagccggacaacagggtccaggtggagctggacaacaaggtccaggatcacaaggtcctggtggacaaggtccatacggtcctggtgctggtcaacagggaccaggtagtcaaggacctggttcaggtggtcagcagggtccaggaggacagggtccttacggcccttctgccgctgcagcagcagccgctgccgcaggaggatacggacctggtgctggacaacgatctcaaggaccaggaggacaaggtccttatggacctggcgctggccaacaaggacctggttctcagggtccaggttcaggaggccaacaaggcccaggaggtcaaggaccatacggaccatccgctgcggcagctgcagctgctgcaggtggatatggcccaggagccggacaacagggtcctggttcacaaggtccaggatctggtggtcaacagggaccaggcggccagggaccttatggtccaggagccgctgcagcagcagcagctgttggaggttacggccctggtgccggtcaacaaggcccaggatctcagggtcctggatctggaggacaacaaggtcctggaggtcagggtccatacggaccttcagcagcagctgctgctgcagccgctggtggttatggacctggtgctggtcaacaaggaccgggttctcagggtccgggttcaggaggtcagcagggccctggtggacaaggaccttatggacctagtgcggctgcagcagctgccgccgcaggtggttacggtccaggcgctggtcaacaaggtccaggaagtggtggtcaacaaggacctggcggtcaaggaccctacggtagtggccaacaaggtccaggtggagcaggacagcagggtccgggaggccaaggaccttacggaccaggtgctgctgctgccgccgctgccgctgccggaggttacggtccaggagccggacaacagggtccaggtggagctggacaacaaggtccaggatcacaaggtcctggtggacaaggtccatacggtcctggtgctggtcaacagggaccaggtagtcaaggacctggttcaggtggtcagcagggtccaggaggacagggtccttacggcccttctgccgctgcagcagcagccgctgccgcaggaggatacggacctggtgctggacaacgatctcaaggaccaggaggacaaggtccttatggacctggcgctggccaacaaggacctggttctcagggtccaggttcaggaggccaacaaggcccaggaggtcaaggaccatacggaccatccgctgcggcagctgcagctgctgcaggtggatatggcccaggagccggacaacagggtcctggttcacaaggtccaggatctggtggtcaacagggaccaggcggccagggaccttatggtccaggagccgctgcagcagcagcagctgttggaggttacggccctggtgccggtcaacaaggcccaggatctcagggtcctggatctggaggacaacaaggtcctggaggtcagggtccatacggaccttcagcagcagctgctgctgcagccgctggtggttatggacctggtgctggtcaacaaggaccgggttctcagggtccgggttcaggaggtcagcagggccctggtggacaaggaccttatggacctagtgcggctgcagcagctgccgccgcaggtggttacggtccaggcgctggtcaacaaggtccaggaagtggtggtcaacaaggacctggcggtcaaggaccctacggtagtggccaacaaggtccaggtggagcaggacagcagggtccgggaggccaaggaccttacggaccaggtgctgctgctgccgccgctgccgctgccggaggttacggtccaggagccggacaacagggtccaggtggagctggacaacaaggtccaggatcacaaggtcctggtggacaaggtccatacggtcctggtgctggtcaacagggaccaggtagtcaaggacctggttcaggtggtcagcagggtccaggaggacagggtccttacggcccttctgccgctgcagcagcagccgctgccgcaggaggatacggacctggtgctggacaacgatctcaaggaccaggaggacaaggtccttatggacctggcgctggccaacaaggacctggttctcagggtccaggttcaggaggccaacaaggcccaggaggtcaaggaccatacggaccatccgctgcggcagctgcagctgctgcaggtggatatggcccaggagccggacaacagggtcctggttcacaaggtccaggatctggtggtcaacagggaccaggcggccagggaccttatggtccaggagccgctgcagcagcagcagctgttggaggttacggccctggtgccggtcaacaaggcccaggatctcagggtcctggatctggaggacaacaaggtcctggaggtcagggtccatacggaccttcagcagcagctgctgctgcagccgctggtggttatggacctggtgctggtcaacaaggaccgggttctcagggtccgggttcaggaggtcagcagggccctggtggacaaggaccttatggacctagtgcggctgcagcagctgccgccgca

SEQ ID NO: 468 - DNA, 464 bp, synthetic construct
  misc_feature 1..464: note = Description of Artificial Sequence: Synthetic polynucleotide
  source 1..464: mol_type = other DNA
gaagacttagcaggtgcagcgtctgcatctggtgctgcgagcgcctctggtgcagcatccgcgtcagaagcagcaagttcttcctccacaaccataactactaaaggcacttctgcatcgggacttctatcttccccatatggctcggtcagtatttcggttgaaaatagaattatctctttgatatcgtcaatcttgagcgagttcatttctatcgagtccgcttttaactattcctcattcgctaaaaagctggcctttttggcatctgagatctcggtgtccaatccaggtctttctgctagtgaagtcattagtgaggtattgttggagacagtgacagctcttatccacatcttggcaagtagtcaagtgggttcagtctcaacagccgatttgagctctgtttcaagagcctttgctcagtcgttcgcccaggctttcgcacaccaaggtacgtcttc

SEQ ID NO: 469 - DNA, 563 bp, synthetic construct
  misc_feature 1..563: note = Description of Artificial Sequence: Synthetic polynucleotide
  source 1..563: mol_type = other DNA
gaagacttagcaggtgcagcagctacttctagtagtaccactgctgcatcttccgctggctcctcgtcgagtgtatcttcaatttcggcaggtgtgtcctctgatgccggcggcgcctatctatccggagacgtttccgaattcggatccagcggtagtttgccacaagctgtgctcccactgtctcaatggccaggtactggttcttcgggagcagatctattgatatcagatctcctcagtttgagagatggattgctatccagctctgcgtcagagagaatttctgctattattttgccattggtttctgcattatctccgactggagtaaacttctcagagataggtaatattattctttccttaataagtaagataagcggatcatgtgtcggtttatcgccgtctcagaccttttccgaggcattgctggaagttattattgctctaatgcagattttgtcctccgccaaggtcacgacagtatcaacaagtgctagcggaaccgcaagatccttggctcagagtctatcatcagctatggctggaggtacgtcttc

SEQ ID NO: 470 - DNA, 533 bp, synthetic construct
  misc_feature 1..533: note = Description of Artificial Sequence: Synthetic polynucleotide
  source 1..533: mol_type = other DNA
gaagacttagcaggtgctagctccacaactaccacaacggaggctacaggcagtgatgcgtcagcaagaagaatatcgtccggagcatcttccgaaactgccgcgtcatctgtggtagatagttcagtattttccggtgacgtgtcagactactctggtttcaatgtattacctttggtcagcgatctattgtccagttcttcaggattatctagtccagctgccattagacgcatcgactctcttattccattgttgttttcctcagcatcctccaataatttgagtgcatcattcctatccaacgtgttggctactagtgtttctcagatctccgaaggttcatcgggtttatcagctactcagattatcattgaggctttgttcgaactgattagcggactaatgcatattctgacctctgcccactttgacgcagtttcaagggccacatcctcggccacagcctctgcactggccaactcactgtctactgcattttcaggagttaataatatcgcaggtacgtcttc

SEQ ID NO: 471 - DNA, 479 bp, synthetic construct
  misc_feature 1..479: note = Description of Artificial Sequence: Synthetic polynucleotide
  source 1..479: mol_type = other DNA
gaagacttagcaggtgcaggtgcaagggctgctggaggctacggtggaggatacggtgccggtgcgggtgcaggagccggcgccgcagcttccgccggagcctccggtggatacggaggtggatatggtggcggagctggtgctggtgccgtagcaggtgcctcagctggaagctacggaggtgctgttaatagactgagttccgcaggtgcagcctctagagtgtcgtccaacgtcgcagccattgcatctgctggtgctgccgctttgcccaacgttatttccaacatctatagtggtgttctttcatctggcgtgtcatcctccgaagcacttattcaggctttgttagaagtaatcagtgctttaattcatgtcttaggatcagcttctatcggcaacgtttcatctgttggtgttaattccgcacttaatgctgtgcaaaacgccgtaggcgcctatgccggaggtacgtcttc

SEQ ID NO: 472 - DNA, 458 bp, synthetic construct
  misc_feature 1..458: note = Description of Artificial Sequence: Synthetic polynucleotide
  source 1..458: mol_type = other DNA
gaagacttagcaggtggacagggtggtcaaggaggttacggaggactaggaccgcagggtgctggcggcgccggtcagggtggatatggcggtggctcattacagtatggcggacaaggccaagcgcaagcggcagcagcttctgccgctgctagcagattgagttccccatcagctgctgcaagagtctcctccgctgtaagcctcgtgtcaaatggaggacctactagtccagctgctctgagttcgtctatttctaatgtagtatctcaaatttccgccagtaacccgggattgagcggatgtgacatattggttcaagctctattggaaattatcagtgcacttgtgcacatactgggctcggccaatattggccctgttaattcatcctcagctggtcaatccgctagcatcgtgggccaaagtgtatacagagcactctcaggtacgtcttc

SEQ ID NO: 473 - DNA, 485 bp, synthetic construct
  misc_feature 1..485: note = Description of Artificial Sequence: Synthetic polynucleotide
  source 1..485: mol_type = other DNA
gaagacttagcaggtggttacggaccaggatcgggtcagcaaggaccgggacaacaaggtcctggtcaacaaggcccaggaggtcaaggtccatatggacctggtgcagccagcgcagctgtttctgtcggtggctatggtccccagagctcttccgttccagttgcttccgcagtggcatctagacttagttctcctgccgcgagttctcgagtcagttctgctgtgtcatcattagtatctagcggtccaactaaacacgcagctcttagtaacaccattagctctgtggtaagccaggtatctgctagtaatcccggattatccggatgtgatgtactggtccaggcattgctggaggtggtcagtgcattggtttccatcttgggcagtagtagtatcggtcaaattaactatggtgccagcgcccagtacactcaaatggtaggacagagtgtggctcaggccctagcaggtacgtcttc

SEQ ID NO: 474 - DNA, 425 bp, synthetic construct
  misc_feature 1..425: note = Description of Artificial Sequence: Synthetic polynucleotide
  source 1..425: mol_type = other DNA
gaagacttagcaggtagtggaccaggaggatacggccctggctcacaaggtcctagcggtcctggttaccagggtccctcaggtccaggtgcatatggaccttccccatcagcttcagcttcggttgctgcatctgtctacctgagacttcaaccacgtctggaagtatcatccgctgttagtagtctagtatcgagtggtccaacaaatggtgctgcagtaagtggagctctgaactctctagtttctcagatttccgcatcaaacccaggtttgtccggttgtgacgcgctagttcaagctctgcttgaactagtctctgctttggttgcaattctctcttccgcgtcaataggccaggttaacgtttctagcgtctcacaatcaacacagatgatttcgcaggctctgtcaggtacgtcttc

SEQ ID NO: 475 - DNA, 626 bp, synthetic construct
  misc_feature 1..626: note = Description of Artificial Sequence: Synthetic polynucleotide
  source 1..626: mol_type = other DNA
gaagacttagcaggtagtgctacctcatcaacaactactactacaaccgtatccaagagtgcagctgctgcagcggctgccgcagccgccgcgtcctccgcttcatctgcttccagagacagcgataggtcctcgagcgcagcaaaagcatacgcatcgtccagtgccaatgcttcttcgaacttcgaaaactaccaaacttctgacctaagcaggccatacgcaacttcctctaacgctccggcatctacgtcaggtatcaagaacgacttatcccctctgatttccggtttaatatcgtctagttctggtttgggttcatctgatgcatccgaccgcatctcatatttgttaacctccttgttgtctgtcattaattcagagggaggaagaatagatttcgcagcggttgcgaacattctcgtaagtttggttagcgagataagagccaagaatagtgaattgtcatacttccacatcttgattgaggcactattcgaggttttgtctgccgttctacaaattatttcttcttctcatatcgttatcggtaatgctagtttttcaagctcttctaacctagcctttgccgatgcatgtgccaaggcattctcaggtacgtcttc

SEQ ID NO: 476 - DNA, 584 bp, synthetic construct
  misc_feature 1..584: note = Description of Artificial Sequence: Synthetic polynucleotide
  source 1..584: mol_type = other DNA
gaagacttagcaggttctgctgaggcttcctctgttgcccgtttgagttctgcatcaaatgacgtctatggcccaaccgctgaagaatttggtgcatcaggaagtgcgctcggtgtgtcccagtacggtgaattcggaggattggacgaagtcagtggaccagcacttcagagcactagtccgcccttcctaccactgacctccgacattggtcgcttcagcccagagatttctaggctgctctcgagcccaagcggactcacatccgaggcagctaaggaaagaatatcatccattattgcctctttgctcagcgctaaatcgtctcaagattttaatgccctcttactgtctaacatccttccatccttaatatccaaaattagccaaagagcatccggactttctccaaccgaaatggtgacggaagccctccttgaagtgctagcaggatgtatggaaatcttgtctagctttaatgtgggtgctcagtccattagtagtagtcgtacttcttcaaatgcacttgttcagtctataagtaaccaatttagtggtctgaacgctgctgcaggtacgtcttc

SEQ ID NO: 477 - DNA, 539 bp, synthetic construct
  misc_feature 1..539: note = Description of Artificial Sequence: Synthetic polynucleotide
  source 1..539: mol_type = other DNA
gaagacttagcaggtgcttcttccgctgaaagtcgtaccagtgctgctcagtccggaacctcaggttctgcattaggagtcagtctatatggaggcagtggcagcttctatcaaggtaccgcaccggagttgctttctacatcccctgcctcatctcctgtagtgtcagacattggtccagaactgagctctttgctgtctgcacccacaggtctgacttctgaagcagctaaggaaagaatagctagtattattccatcgttactatccgctatttcgccaaacgagttcgacgcagttttattgtctgattccctagcttccttaataagccaaataagtcaatcaggaagcggtcttagtacgtctcagatcgccatggaagctctgttggaggtgttagcaggatgtatggaaatactgtcgagctcgaatgtcggtgccgcctcagtttcttcttctagggcttcatcgaacgccttggtgcagagtatctcaaacgcattcagtggcttaaacgcggccgcaggtacgtcttc

SEQ ID NO: 478 - DNA, 560 bp, synthetic construct
  misc_feature 1..560: note = Description of Artificial Sequence: Synthetic polynucleotide
  source 1..560: mol_type = other DNA
gaagacttagcaggtagagccgttgcaagtggagcagccggatctggagcatcatctgccgctagatctggtgcgtctggatctgcatcaggtgtagcgaagtacggaggatacggtggatccagtgatctgagcggcccagccttccctaagattagcccagtctctttgccccatattcctgacggacgtccattcctgccggtaacatctgacctactctcgagtcctgctgatttaactagtccagccgcaaatcaaagaatcacttctataattcccattttgagatcaggtatctcacctaagggattcgatgcatcactgttagccgactccttatcaagtttgatttctgaaatttcacagtctgcttcagagcttagcgcttctgatgtactaaccgaggctctacttgaattagtctccgcgttccttcaaattttaagttccgatgctggtagtgttggtatatcgagttctacagctttctcaaatgctctagctcaatcagtttctaatgctttctatggtctgaacactgttgcaggtacgtcttc

SEQ ID NO: 479 - DNA, 479 bp, synthetic construct
  misc_feature 1..479: note = Description of Artificial Sequence: Synthetic polynucleotide
  source 1..479: mol_type = other DNA
gaagacttagcaggtgcaggagttggagctggagttggtgcgggtgcaggtgctggcttcggtgctggcgttggcgccggagtaggagcaggatatggagctggcctgggtgctggatctggagtcggttatggatcaggatcctccattgtttctacttctggaggtgattttagcacaactcttagttcagcttcctcagttttagcaagcccacaaagcgtcacaagggtatccgctttggtccctaaccttatttcaggaggatcttttaattccaacgcagtttcagctgtgctgccaggattgacatctcaaatcaaggctgccacaggttctaatggatgcgactcattcgtgatcgcgttgttggagattgttagcgctttaggccatcttcttaataactctatgatcaacgttaacgccgcaagcgttcctgtgtcccctccacaatggctttactcaggtacgtcttc

SEQ ID NO: 480 - DNA, 554 bp, synthetic construct
  misc_feature 1..554: note = Description of Artificial Sequence: Synthetic polynucleotide
  source 1..554: mol_type = other DNA
gaagacttagcaggtgctggagttggcgcaggagccggagcaggagctggtgctggtgtaggtgccggtttcggtgcaggtgttggtgctggcgtcggtgccggagccggtgcaggagttggagctggcgtgggcgctggtgcaggagctggattcggagccggtgttggagccggagtaggagcaggtgtcggtgctggatacggcgccggactgggttcaggcgtcggtgcctccttcggtggcgactttcgtacaacgctgtctagtgcaagtagtgttcttgcaagtcctcagtctctgactagagttaacaccctagttccatcattaatctcaggaggatcatttaatagtaatgctgtttcacgtgccttatccgatcttaactcccaaaatcgcgccgctggtagtacgggttgtgattctactattcaaacattgtttgagatggtttctgctatggaccatatccttaagaactccattatctcagataccgctgcttccgttccagtttcccctccacaatggttatattcaggtacgtcttc

SEQ ID NO: 481 - DNA, 509 bp, synthetic construct
  misc_feature 1..509: note = Description of Artificial Sequence: Synthetic polynucleotide
  source 1..509: mol_type = other DNA
gaagacttagcaggtgctagttcctctgctgcggctgcagctgctaccggtggaggtggagccggtggttacggaccaggtataggtggaggctatggtccagcttctccgactggtaccggttccggactgggttccggcgcaggagcagtatcccctgcaagtggaactggtttaggtggatatggaggaggatccttggaatcttctataagtggtctaagttcacaagccagcgccacacgcgtttctagcctgtcctcttcactcacttcaggtggcactcttaatctggccgcgttaccaaatcaactacaacaatccgccagtgaaatatcagttagttccccaggtgcatctagctgtggcacaatggtgcagttactgttggaattgtcatactctctgatctatgccttgagtagtgcatacggtaccgacgcttcttacgttaacgaggcaatgaacaacatattccatattttgaatgcctttccaggtacgtcttc

SEQ ID NO: 482 - DNA, 431 bp, synthetic construct
  misc_feature 1..431: note = Description of Artificial Sequence: Synthetic polynucleotide
  source 1..431: mol_type = other DNA
gaagacttagcaggtgccggaggtgccggtggcggacaaggaggatacggtggtcaaggtggttacggtcagggtacaggagcaggtggagcctcatccgctggtcttagcgtcacagttggaaatatggtttcacgtctgtcgtctccggaagctgcctcgcgcgtatcctccgcggtgtcctccctagttagtaacggccaagtgaacgttgacgcactacctagcataataagtaatttatcttctagtatcagcgcaagtgccactaccgcttcagactgcgaggttttggttcaggtacttcttgaagttgttagtgcattagttcagattgtctgttctgccaacgtcggttacattaatccggaggcatctggctctcttaacgcagtaggttcagccttggcagctatgggaggtacgtcttc

SEQ ID NO: 483 - DNA, 740 bp, synthetic construct
  misc_feature 1..740: note = Description of Artificial Sequence: Synthetic polynucleotide
  source 1..740: mol_type = other DNA
gaagacttagcaggtgcttatgcatacgcttacgccattgcaaacgctttcgcctcaatcttggctaatactggactactcagtgtttcttcagctgctagtgtcgcttcatccgttgcctccgccatagcaaccagtgtaagttctagttccgccgctgcagccgcttccgcatccgcagctgcagctgcatcagccggtgctagtgctgccagttctgcatccgcctcttcttcagcaagcgctgccgcaggtgctggagcgggtgctggtgccggagccagcggcgcatccggtgctgctggcggatcaggcggtttcggtctgagttcaggtttcggtgcaggtatcggtggtttgggtggatatccatccggagctcttggaggcttgggaataccatccggtctgctatcttcaggattactatctccagctgccaaccagagaatagcaagtctaattcctttgattttaagtgccatttcacctaacggtgttaacttcggtgtcatcggctccaacattgcatcactagcgagtcaaatctctcaaagtggtggtggtatcgctgcttctcaggcttttactcaagctctcctagaattggtggcagcatttatacaagttctttctagtgcacaaattggtgcagtgtcgtcatcttctgcttctgcaggtgctacggccaatgcattcgctcaatctctgtcctcggcattcgcaggaggtacgtcttc

SEQ ID NO: 484 - DNA, 461 bp, synthetic construct
  misc_feature 1..461: note = Description of Artificial Sequence: Synthetic polynucleotide
  source 1..461: mol_type = other DNA
gaagacttagcaggtgcaggagctggtgctggttcaggtgccggtgcgggagcgggtgctggtgccggtagcggtgcctcaacctcggtcagtacatcttcatcgtctgccgctggagctggagccggcgccggaagtggtgcaggagccggctcgggtactggtgcaggcatagccctcccatcaatcgtattgtcacctgctgcatcttctagaatttcttcggtttcttcatctgtacaatctgctggatcgggattgagttttagctcattgagtaatacattatcacaaacagcaagcgctatacgtagctcaaatccacagctgtcctcttctgacgttctcatccaatctttggtcgaaattattgttggactggttcaagcatttactggatcttcagcttcagcgcaaacgttcgtaaactccctgtcacaggtggccggaggtacgtcttc

SEQ ID NO: 485 - DNA, 575 bp, synthetic construct
  misc_feature 1..575: note = Description of Artificial Sequence: Synthetic polynucleotide
  source 1..575: mol_type = other DNA
gaagacttagcaggtcagggaacagatagttcggcttcgagcgtctcgacatcaacttcagttagttcatctgcgacaggacctggttcgagatatcctgtaatggactacggtgctgatcaggctgaagcggcagcctcagctgctgcagcagcagctgccgaagcagctactattgctggactggattacgaaggtcagggacagggcacagattcaggtgcctcatccgtttcttcttctacatcggtaagttcctcagcaacaggtgttacgcagactactatagcgctgcctccagatgtcagtgccagaatttcgttcctcacttcctacttgcagtcagccggttccggattatcactctacactctatctaatttgttgtctcaaaccgctttggccatttctaaatctcgacctgaactgagtccaaacgaggtactgattcaaagtctagcagagattattgtagctcttgtgcaagcattgacaaagcaagctagttcttccgccagtgtgcagtacttcggaagattcaattctttgagtcaggtcgcgggaggtacgtcttc

SEQ ID NO: 486 - DNA, 419 bp, synthetic construct
  misc_feature 1..419: note = Description of Artificial Sequence: Synthetic polynucleotide
  source 1..419: mol_type = other DNA
gaagacttagcaggtactgtcgctgagagtggtagtactgctgcctcttcgtcctacgccgcagcggccgcggctagttcctctgctggcagcacatcgtccccgtcgtttctaagtgctgattcactgagttcgtcccttgcttctttaagaatctgttcattctcatccaaattgatgtctagtttgtacagtggagatggtttggacattgctgaattttcagacgcagtgtcatccatggtatccagcattaagtctagcaaccctggagtatcagcttctcagatactgacggaactactgtttgaggtaattgttgcctttgttcaggccttgactaaaagcaaattttccacaatggagacagccgagtcgcttattgctgcttttgctcaagctttcgtaggtacgtcttc

SEQ ID NO: 487 - DNA, 602 bp, synthetic construct
  misc_feature 1..602: note = Description of Artificial Sequence: Synthetic polynucleotide
  source 1..602: mol_type = other DNA
gaagacttagcaggtccaaaggaagaacctttgggtgaaagctcagttattgctactagcgtttctgccgcttcttctgttagttctggtggcgctccaggcgtacagggtggaggcccagtgacagtgtcatacagagaaggaccttctcaaattcctagtcaacaaaccttacttcaagccgttcctagcacgcaaagtgttggatccggtgtaccggttggtccgaaccaatatgaaatggtttacgcaccactgcaacagtttggtggtgtttcagcttcaaacttgctttcaccttccgcacactcaagaatcgcatccctgatgtcagacgttctttcattgttttctccaggtaactctggattcaactatggaggattcgcaagggctctttcttcagttgccagagccgtaagccaatctaatgctaagctttcgactactgatgttatcatccaggtccttatggaagcattagtggctttaatagagctgttgtccggtgctaagatcggagtggtccacccagttagagcccaagcgggtgcaagcgcatttgcacaacactttggatctgctttcggaggtacgtcttc

SEQ ID NO: 488 - DNA, 731 bp, synthetic construct
  misc_feature 1..731: note = Description of Artificial Sequence: Synthetic polynucleotide
  source 1..731: mol_type = other DNA
gaagacttagcaggttctttgggataccaactagccctacaaagggctaactctttgggcataccgaatgccgcttctgtggctggcgcagtagctgaagcggtttctgcagtgggtgtcggagctagctcatacgcttatgcctctgcaatttcaaacgcagttggtccgttgttgatatcgcagggactgctgtctcagtccaacgcttcagcgttggcgagttctttcgcatcagcatttgcggctagtgctgtaagtagctcgtctagttctggttctacttcacaaacattgggttcatacttattgggaactcgacctgctttatcaagcaggcttggcttgttgaatttgcctagcagtgttgccgtaactagacctgcctttgtgtccttgatatcacctgtgctatcctctgaaaccggtctatcttctgcgtctgcctctagtagagtcaacagtctggccagttctgttgcctcagccatagctagcggccaggccttaagcgctgactctttcgctaagtcgctattgatacaagcctctcagattcagagttcggctccaagttttaaggcagatgacgttgttcatgagtcacttttggaaggtattagtgctcttattcaagtaataaactctagttatggaagcccactatccctaagtaatgcacaaaccgttaatgctggtctggttaattacttcttggtaggtacgtcttc

SEQ ID NO: 489 - DNA, 638 bp, synthetic construct
  misc_feature 1..638: note = Description of Artificial Sequence: Synthetic polynucleotide
  source 1..638: mol_type = other DNA
gaagacttagcaggtaatgttggctaccaattgggtctaaaagttgctaattccctaggactaggtaacgctcaggctctggcatcccaaggcattttgaacgcggccaatgcaggatccctagcatcctcttttgccagtgcgcttagcgcttctgcaggctcggtgggaaacaggtcgagcgcgggaccatctgccgtcggactgggaggtgtatcagccgtgccaggatttattagcgctaccccggtggttggaggtccggtgactgttaatggtcaggtactaccggccgccttacagacggctttggcccctgttgtgacatccagcggattggcatcctcagcagcttctgccagagtgagttcgttagcacaaagtatagcatccgcgatctcttcttctggcggtacattatctgtccctatattcttgaatctcttatccagtgcaggcgcacaagcgactgcttcctcatccctctcttcgagtcaagtaacgtctcaagtattattggaaggaattgctgccttgttgcaagtcattaatggtgcccaaattagatccgttaacttagctaatgtgcctaacgttcaacaagcccttgtttctgctctatctggaggtacgtcttc

SEQ ID NO: 490 - DNA, 737 bp, synthetic construct
  misc_feature 1..737: note = Description of Artificial Sequence: Synthetic polynucleotide
  source 1..737: mol_type = other DNA
gaagacttagcaggtaacgttgcgtatcagctaggctttaacgttgcaaacaccttaggattgggcaacgcagccggtctaggtgcagctttaagtcaggccgttagttccgtgggtgtcggagcttcttctgcgacctatgctaacgcagtatcgaatgctgttggtcagttcttggccggtcagggaattttaaatgcggcaaatgcagcatccctggctacttcctttgccaacgctgtgtcatcaagtgcattggcggccgtttcaagaatcagctcgccatcttacggtgcttttgcatctgttccaaaattcgttccaagtaacttgaatgcgggcggagtctccttcggagaacctttcgctgcattatcccaatccgtgccgacagacttacagagcgcccttgctccaattgcttcctcttctggactgggatcttccgctgcctcagccagagtgtctagtttagcgaatagtgtcgcatcagctatttcgtcgtcaggcggatctttgtctgtccctacattcctaaattttctttcctcagtaggagctcaagtttctagctcttcatctttaaattcgtcagaggttacgaacgaggtcttgttggaagcgattgccgctctgctccaagtgctcaacggagcccagataaccagcgtaaatttgagaaacgttccaaacgcccagcaggcacttgttcaagcactatcgggaggtacgtcttc

SEQ ID NO: 491 - DNA, 533 bp, synthetic construct
  misc_feature 1..533: note = Description of Artificial Sequence: Synthetic polynucleotide
  source 1..533: mol_type = other DNA
gaagacttagcaggttctctagctagttcttttgctaacgctttatccaactcggctttgagtgtaggatctagagtaagttccccttcttatggagcattgagtccaatagctgctggtccaaactttatatcaactggactgaatgtcggaggtccatttacaaccttgagtcaaagtttgccaacctccctccagacagctttggctccaatcgtatcctcttccggacttggtagttcagcagctacagccagagttcgtagtttggctaatagtatcgctagtgctatcagttcttctggtggttctctgagcgtcccagcctttcttaacctactaagtagtgttggagcccaggtttcgtcatcttcctctcttaattccagtgaagttactaatgaagtactgctggaggctattgccgcactattgcaagtaatcaacggaggtagcattacgagtgttgacctcagaaacgttccaaacgcccaacaggatttggtcaatgctctatccggaggtacgtcttc

SEQ ID NO: 492 - DNA, 746 bp, synthetic construct
  misc_feature 1..746: note = Description of Artificial Sequence: Synthetic polynucleotide
  source 1..746: mol_type = other DNA
gaagacttagcaggtaatgtcggataccaactgggttttaatgtcgctaatacgcttggaatcggaaacgctcctggtctaggaaatgccttatctcaggctgtatccagtgtaggagttggagcttcctcatcagcctatgccaacgctgtttctaatgcggttggtcaattcttagccggtcaaggagttctaaacgctggcaatgctggttcactagctagctcattcgccaacgcactgtctaactcagctctgtcagttggaagtagagttagcagtccatcttacggtgctctatccccaatcgcagctggtccaaatttcatttctacgggattaaatgttggtggtgcttcggttggtggaccgtttgactctcttagccaatccttgcctacctctttgcagactgcactggctcctatcgtctcctcttctggactgggatcaagtgccgctacagcaagggtatcatctctggcaaactccttcgccagcgcaataagctcctcaggtggctcattaagtgtgccaacattcttgaatctgctgagttccgtcggtgcccaagtatcaagttcttcatccctgtcgtcccttgaagtgactaacgaagttttattggaagcgatagccgcactactacaggttattaacggcggttctattaccagcgttgatcttagatacgtacctaacgctcaacaagacctggtaaacgcactctctggaggtacgtcttc

SEQ ID NO: 493 - DNA, 560 bp, synthetic construct
  misc_feature 1..560: note = Description of Artificial Sequence: Synthetic polynucleotide
  source 1..560: mol_type = other DNA
gaagacttagcaggttccctagccagcagttttgcctcagccctgtccaactccgctctatcaattggatcaagggtcagttctcctagctacggagttttcagcccaatagccgccggtccaaatagcatctccacaggtttgaacgttggcggagcttctattggtggtccttttgctactttgtcacaaagtttaccgacttccctgcaaactgctttggctcctatagttagttcctcgggactaggatcttctgcagctactgcaagagtgagttcactcgctaatagtatcgcatcagccatctcctcatcaggtggatctctgagtgtgccaacctttttaaacctactgtcatctattggagcccaagtctcgagttcatcctcattgtcctcctcttctgaagtgactactcaggtcttattggaggctatcgcagctctactgcaggtgattaatggtgcccaaatcacttcagttaacttctccaatgtctccaacgtcaatagagcattggtagattctttggttggatccttcgcaggtacgtcttc

SEQ ID NO: 494 - DNA, 626 bp, synthetic construct
  misc_feature 1..626: note = Description of Artificial Sequence: Synthetic polynucleotide
  source 1..626: mol_type = other DNA
gaagacttagcaggttcggcaacctcatccactaccaccaccacaactgtttcaaagtcggccgcggcggccgcagctgccgccgccgctgctagttcagcgagttcggcttccagagatagtgacagatcaagttccgccgctaaagcgtatgcctcttcctcagcaaatgcttcttcaaatttcgagaactaccagacctctgatctctctagaccctacgccacttcgagcaacgctcctgcatctacctcgggcatcaagaacgacttgtctcctttgatctcaggattgatctcctctagctctggtcttggctcttcagacgcctcagatagaatatcatacttattaacatccctactgtcagttataaactcagaaggtggtaggattgacttcgctgccgttgcgaatattcttgttagtctcgttagtgagatcagagccaagaattccgaactttcttactttcacattttgatcgaggcactgttcgaggtactcagcgccgtattacagatcatttcttcatctcatatagttataggaaacgcatcgttctccagcagctcaaacctggcattcgccgatgcatgtgcaaaggctttttcaggtacgtcttc

SEQ ID NO: 495 - DNA, 830 bp, synthetic construct
  misc_feature 1..830: note = Description of Artificial Sequence: Synthetic polynucleotide
  source 1..830: mol_type = other DNA
gaagacttagcaggttcttttgcttctgctagcgcttacgctttcgcttttgccagtgcattttctcaggttctttccaactacggtctgctgaacataaacaatgcttattcattggcatctagcattgccaatgctgcctcaacttcagcttcctcagccgctgccgcagccgtagtagcatctagttcaagtgctgccaccgcagctggtgcagcatccacatctgtcccagcaacaagtttgtccagtgccactagagtcggtggttctttgtcctctgctgtttcacctgcctccgcaaggacggccacaggtgatggtacaacgtacttgccagtccagattcagccaggaatcggtttcgtcccaagtctgtctggagatattggaccaaacgtcccaggatccggaggatttggatcccccgctttacctagtccagtgtatggacctgcaatcctgggcccaggactcgttgcacctgccctggcaaatttgctaccacctttgtccgttcttcctagtgattctgccaacgaaaggatatcatcggttgtttcttctctgttgtcagccatttctagcaacggactggacgcatcctcattaggtggaacgattgcctccctcgtaagtcaaatctctgtttcaaatgccaaactttcatctagccaagtgttcttggaagccctactcgaagtgctttctggaatggtccagatcctcagctacgctgaggttggcgctgttaataccgataccgtaatctcaactagttcagctgttgctcaggccatatcgagcgcggtttccggaggtacgtcttc

SEQ ID NO: 496 - DNA, 683 bp, synthetic construct
  misc_feature 1..683: note = Description of Artificial Sequence: Synthetic polynucleotide
  source 1..683: mol_type = other DNA
gaagacttagcaggtgcttctgcatcagcctacgcctcagcttttggctctgctattggacaatacttggcgggtatcggtatcatttcccaatccaatgcaagtgctctagctagttccttcgcatcagctatctcaagtgctgcgggctcactttcactgggtggtccattcggtgtatccggattgggtattggtggtttgccagttggagtctcgcctgtcggagtcgtcggtccagcaggagtctacggtccggcaggtctttacggacctggagtggtgggttccttaggaccagttacaccattgaacgtaatatatccttctttaacaacctcgattgccccaattattgtgggacctgccggactgagttcggcagcagctacttctagggcttcgtcccttgcttctagtgtcgcatcggccattagcagtgcaggatcggcaggtggtgtggatgtgggactgtttgcttctggattatcaagtctagtaagtcagattcagtcatctaatttaggtctgcagccggaccaggtgctgctagaggctttactggagggatactcggctctagcccaggttcttatttcaagccagatttcgtctgtttctgtctcatcatcatccgcactaggtccagcgttgttgaattacttggtcggaggtacgtcttc

SEQ ID NO: 497 - DNA, 560 bp, synthetic construct
  misc_feature 1..560: note = Description of Artificial Sequence: Synthetic polynucleotide
  source 1..560: mol_type = other DNA
gaagacttagcaggtattctgacgcaggagaacgcctcttcacttgcgtcgtcagtagctaatgctctcagtgcttcatctctgttggttccatctgctataagcaccggtgtacctggactaattgttggtccgtctattgtatcctctttgaacgccccaatagcaggtttcgcagtcccgggcgtagcccaggtcattgtccccacagcctattccaccttactagcaccagtattatccccagccggattggcgtctacagctgctacttccagaatcaacgatattgctcagagcctttcatcgaccctctcaagcggatcacaattggcgcctgacaacgtcctacctggtctaatacaattgagcagttctattcagtcaggaaatcctgacttggatcctgctggagttctcattgaaagtttgttagagtacactagcgccttgcttgctctgctgcagaatgcccaaatcacaacatacgatgccgctacgttgccggcattcaacactgcactagtgaattatctcgtgccactcgtaggtacgtcttc

SEQ ID NO: 498 - DNA, 590 bp, synthetic construct
  misc_feature 1..590: note = Description of Artificial Sequence: Synthetic polynucleotide
  source 1..590: mol_type = other DNA
gaagacttagcaggtgttttgaacgccgtcaacgcatcatcactgggttcggccctagccaacgcactgtcggactctgctgcaaactcagccgtaagtggaaactacttgggagtatctcagaatttcggaagaattgccccggtaaccggaggaacggccggaatttcagtgggtgtgcctggctatcttcgaacaccaagctcaactatccttgcccctagtaacgcccaaattatttcacttggtttacaaactaccttagctccagttctgtcgagttccggtttatcttcagcgtctgcatcggctagggtgtcctctcttgcccaatctctcgcctctgccttgagcacatccagaggtactttaagtttatcgacatttttgaatttattatcatccatttcgtctgagatcagagcttccacatctctggacggtactcaggcaaccgtagaagtgttgttggaagcactggctgcactactgcaagtgataaacggtgcccagattactgatgtcaacgtctcttcggttccaagcgtcaatgctgcgctcgtttccgcacttgtagcaggtacgtcttc

SEQ ID NO: 499 - DNA, 719 bp, synthetic construct
  misc_feature 1..719: note = Description of Artificial Sequence: Synthetic polynucleotide
  source 1..719: mol_type = other DNA
gaagacttagcaggtatcgccagtgatacggcgctcgccggtgcactggctcaagctgtcgctggcgttggtgctggagcctctgcttctacatatgccaatgttattgccagggcggctggacagttccttgcaacccagggtgtcctaaatgccggcaacgcatccgcattgggatccgccctcgcaaacgctcttagtgacagtgcagccaactcagccgttagtggaaactatgtgggcgcctcccagaatttcggaagaatcgcacccgtcactggaggaactgccggtatatcggttggagttcctggtttcttaagaacaccagcttctaccattttagtcccttcaaatgctcagatcatctcacctagcttacagacaactctggcacctgttctctcttccagtggactgagttcggcctcagcgtcagcacgtgtcggatccctggcacagtccttggcatcggcactctcaacatcgagaggaactttgtcattgtctaccttcctgaacttgttatcaccgattagctcggagattagagcaaatacgtctttggatggcacgcaggcaaccgtggaagctttgttggaggctctagccgctcttttgcaagttataaatggagcccagattactgatgttaatgtttctagcgtaccatcggtaaacgctgcgttggctagtgctttggttgcaggtacgtcttc

SEQ ID NO: 500 - DNA, 653 bp, synthetic construct
  misc_feature 1..653: note = Description of Artificial Sequence: Synthetic polynucleotide
  source 1..653: mol_type = other DNA
gaagacttagcaggtgccactgctgcttcctacggaaatgccttgtctacagccgccggacaattttttgctgcccaaggactactaaatgctggtaatgtatcgagtctggcttccgccttagcgaatgctctcagctatagcgctgctaattccgccgcttctggtaattacattggagtttcacaaaattttggtagcattgctccggtcgctggtacagctggtatctcagttggagtaccaggcctattgcccacatctgccggcacggtgctcgctccagcaaatgcgcaaattattgcgccaggcttacaaacaactctagcaccagtcttttcaagtagtggtttgtcatctgcctccgctaatgcaagagtctcctcactggcacagtcgtttgcttctgctttgagtgcttcacgcggaacgttgagtgtatctacttttctaaccttattatccccaatttcatcacaaattagagcaaacacaagtctagatggaactcaagcaactgtgcaagttttgcttgaggctctggccgccttgctccaagttattaatgcagctcagattaccgaagtcaatgtgagtaacgtatctagcgccaatgctgcgttggtttcagcactggctggaggtacgtcttc

SEQ ID NO: 501 - DNA, 605 bp, synthetic construct
  misc_feature 1..605: note = Description of Artificial Sequence: Synthetic polynucleotide
  source 1..605: mol_type = other DNA
gaagacttagcaggtcaatttcttgccaatcagggcatcctgaacacaggtaatgctagttcactggcatcatcgtttagtaatgctttaagttcaagtgctgctaatagtgtcggatcaggattgttgctgggtccaagtcaatacgttggttctattgcacctagtattggtggtgctgccggtatctccatagctggacctggaatcctttcctacttgccaccagtttctccactgaatgctcagatcatatcgtcaggtcttttagcctcgctcgcaccggtgctgagttcttcaggtttggcttccagctcggctacctcaagggtcggttctctggctcaatcccttgccagtgcattacagtcgtccggcggaactctcgatgtatctactttcctgaatttgttatcaccaatttctacccagatacaagctaatacctcattgaatgcctctcaagccatagtccaagttttgttggaagccgtggcggcattattgcaaattatcaatggtgcacaaataacgtctgttaatttcggatcggttagttcagtaaacactgcattggccaccgcattggctggaggtacgtcttc

SEQ ID NO: 502 - DNA, 974 bp, synthetic construct
  misc_feature 1..974: note = Description of Artificial Sequence: Synthetic polynucleotide
  source 1..974: mol_type = other DNA
gaagacttagcaggtagtcagtcagcttcacaggctgccgcatcatcgagtgcttctgccagcgcttctgcaagtgcattcgctcaatctgcttctctggcactggctagctctagctcattcgcctcagcaatttcctcagtctccagtgtaagttccctaggatctttgggctatcaggtaggtttgcaagcagccggcagtctgggcatcagtaactcgcaggctttcgcttcctctatctcacaagctcttacatcagtgggtgtcggagctagttccgccgcatacgcttccgcagttagtggtgtcgtcgcccaataccttagcggcaccggagtcctttcatccgccaatgcccaggctttggcctctagttttgccaacgtttttgctgctagcgctgcttctgcatcagctgcaacctccgcctcctcttctgcctcagctcagagcgcagcagcagcattaacgcagaaccaatccgctgcctctgctttcagccaggcagctagtcaagctggttcacaagccagttctcaagccggaagtcaagttgccagccaatctgctagtggtctgggtgctttcggttttggtactagtgcatctggcattataacgagctctccatctttggctaatctggtttcgaacgtcgctccgatactcctgtcctctaacggtttgagctcttcttcagcaagttcgagaataaattccattgcatcaggtctttcaactgccttatcgagctcgagaggcgtgtctctcgagaatttgtcctcatccttatcatctgtatttagcgagatccaaaacaattctttcggtgtctccgcagaacaagccttgatacaagcattgtttgaggtattaacaggtaccgtacaagtgcttaataggggtcagacatcgtttgtttccgtatcttcccctacagttataagctcatcgttctcaggtacgtcttc

SEQ ID NO: 503 - DNA, 680 bp, synthetic construct
  misc_feature 1..680: note = Description of Artificial Sequence: Synthetic polynucleotide
  source 1..680: mol_type = other DNA
gaagacttagcaggtgctgccgctactgccggagcgggagcctccgtagcaggaggatatggcggcggtgcaggtgcagctgctggagcaggcgcaggtggatatggcggtggatatggtgctgtagctggttcaggcgctggtgcagccgccgccgcttcttcgggagctggtggtgccgctggatatggtcgtggctacggcgccggttctggtgctggagctggcgcaggtactgtagctgcatacggaggtgctggtggagttgccacctcatcatcttctgctaccgcctcaggtagcagaatcgttacctctggtggatacggttatggtacttcagctgcagcaggtgccggcgttgccgcaggaagttatgcaggcgctgtcaaccgattgagctctgctgaagctgcttctcgagtttcctccaatatagctgctattgcatccggtggagctagcgcactgccaagcgttatatctaacatctacagcggcgtcgttgctagtggtgtaagctctaatgaggccctgattcaagctttgcttgagttattatctgcattggttcacgtattatcgtcggcttcgatcggtaatgtatcttcagtaggtgtggactcaactctcaatgtagtgcaggacagtgttggacaatatgttggaggtacgtcttc

SEQ ID NO: 504 - DNA, 512 bp, synthetic construct
  misc_feature 1..512: note = Description of Artificial Sequence: Synthetic polynucleotide
  source 1..512: mol_type = other DNA
gaagacttagcaggtgcttatggtggaggatatggaggaggagctgcagttggtcgtggtattacctacggttcagcaagcagttccgccacatcgtcctcaactgcaacttcttccggttctacggccttaactagtgctggatacggaagcggagttggtgtctcagctggagccggagccggcgcagccagcgctggaggttcttactctggatcagtttcaagactttcttccgcagaagcagtgtctcgtgtttcttccaatattggtgctattgcttccggtggtgccagtgcattaccgggagttattagtaatatcttctcgggtgtctccgcatccgctggctcctacgaagaggctgtcattcaaagtctattggaggtgttgtctgcgttactgcacatcctctccaacagctcaattggttacgttggagcggatggcctaacagacagcctagctgttgtgcagcaagctatgggtcctgtagttggaggtacgtcttc

SEQ ID NO: 505 - DNA, 419 bp, synthetic construct
  misc_feature 1..419: note = Description of Artificial Sequence: Synthetic polynucleotide
  source 1..419: mol_type = other DNA
gaagacttagcaggtgcaggaagcggttctcagggagttggttctggatccaattatggtcaattctcttcacaggacgtctcaggtgctgtcttagcttccacgtctagattggcatcaggtcaggccacggaccgagttaaagatgttgtcagcaccttggtgtcaaacggcattaatggcgacgctttaagcaacgccatttcaaatgttatgacacaggttaacgctgctgtcccaggactttcgttttgtgagaggttgattcaagtgctacttgaaatcgtggctgccttggtacatatcttgtctagcagcaatgtcggatcaatcgactacggctccacatcaagaactgccattggagtttccaatgcattggcttccgctgtggcgggtgccttctcaggtacgtcttc

SEQ ID NO: 506 - DNA, 563 bp, synthetic construct
  misc_feature 1..563: note = Description of Artificial Sequence: Synthetic polynucleotide
  source 1..563: mol_type = other DNA
gaagacttagcaggttcaggttcagcctcagtctctactggcggctacggacaaagccaagttgccagagcatcctcttcgagcgccgtaggaaccagctcttccgtctccacatctggcagctctggatatagccaggtcagtggtggatacggacagtcatccgccgtgggacaagcatctgctggttacggtcaaatgcagtcaggagttgctgtttccggtggttctgctagcgctacaatttcaagtgcagctagccgtttgagttctccaagctcttctagtagaatcagctccgcagcttcttcgctggctaccggaggtgtcttgaattccgctgccctaccaagtgtcgtcagtaatattatgtcccaagtttccgcttcaagtccgggtatgtcctcttctgaagtcgtgattcaagccttgttggaattagtgtctagtttgattcatatcttgtcctcagctaacataggacaagtagactttaacagtgtgggaaacaccgcagccgttgtgggtcagagtttaggcgccgccctaggaggtacgtcttc

SEQ ID NO: 507 - DNA, 461 bp, synthetic construct
  misc_feature 1..461: note = Description of Artificial Sequence: Synthetic polynucleotide
  source 1..461: mol_type = other DNA
gaagacttagcaggttatggctcctcatcttcagtgagctccagttcctctgccgccagttctagcacatccggtgtcgtaacatcaggtggttacggctatggtgccggtgcagcagcaggagcgggagctggcgcaggtgcgtcagccggctcttattctggtgctgttaacaggctcagttcagctgaagctgcttcgagagtatcttccaacgtagctgctttggctagcggaggtccagcagccttagccaacgtcatgggtaatatttacagcggagtcgcttcttcaggagtttcttccggtgaggctttagtacaagctttgcttgaagtcatcagcgctctagtccacctgctgtccaatgcgtcaattggtaatgtctcttcggctggtctaggtaacacaatgagcctcgttcaaagcacggttggagcttatgctggaggtacgtcttc

SEQ ID NO: 508 - DNA, 473 bp, synthetic construct
  misc_feature 1..473: note = Description of Artificial Sequence: Synthetic polynucleotide
  source 1..473: mol_type = other DNA
gaagacttagcaggtgctggtgcgggtgcaaccggcggatatggacggggagccggtgctggtgcaacgaacgcaggcggttatggtggtcaaggtggttacggagctggagccagagccttcgcaggtgcgggagtgggcgttggaacaaccgtagcaagtacaacttcaagattgtccactgccgaagcttcgtcacgtatctctacagctgcctccacgctagtttctggaggttacttgaacactgctgctctaccttctgttatcgcggatctttttgctcaagtcggagcttcctcgcctggagtgagcgattcagaagttttaattcaggttttgcttgagattgtctccagcctaattcacatcctatcttccagttccgttggacaagtcgatttcagttctgttggtagttctgctgcagcagtaggtcaatcaatgcaagtcgttatgggaggtacgtcttc

SEQ ID NO: 509 - DNA, 503 bp, synthetic construct
  misc_feature 1..503: note = Description of Artificial Sequence: Synthetic polynucleotide
  source 1..503: mol_type = other DNA
gaagacttagcaggtgccggtgcaggacgcggaggttacggtcgcggagctggagcgggcggttatggtggacaaggaggctacggtgcaggtgctggagccggtgcggccgccgctgccggagctggtgccggtggttacggagataaagagatagcctgttggtcaagatgtcgctataccgttgcttctactacttctcgactttcttctgcagaagcttcgagcagaatttcttctgccgcatcgacattagtcagtggtggttaccttaacactgcagctttgccttccgttatctctgatttattcgcccaagtcggagcatcgtcaccaggagtatcagattccgaagttttgatccaggttctattggaaatcgtatcctccttgatacatattttatcctcatcttctgttggacaagttgacttcagctcggttggtagtagcgctgctgctgttggccaatcaatgcaagtagttatgggaggtacgtcttc

SEQ ID NO: 510 - DNA, 647 bp, synthetic construct
  misc_feature 1..647: note = Description of Artificial Sequence: Synthetic polynucleotide
  source 1..647: mol_type = other DNA
gaagacttagcaggtgcaggagcaggaggcaccggaggatatggtcgaggttccggcgcaggtgctgctgctggagctgcagcaggagccggagccgcaggaggatacggaggttatggagcaggagcgggtgctggagctggtggagccagaggttacggaggaggagctggcgccggcgccggagctgctgcgggtggttatggcagaagggcgggtggatcgattgttggtacgggaattagtgcaatttcctcaggcaccggaagttcttattccgtctcctcaggtggttacgcttctgcaggcgtaggagtcggatccacggttgccagcacaacctcacgcttatcgtcagcccaagcctcaagtcgtatcagcgctgcagcctcgactcttatttccggtggttaccttaacactagtgcccttccttccgtcatttccgatttatttgcccaagtatccgcaagctctcctggtgtatctgactccgaagttctaattcaggtcctgcttgagatcgtaagctccctgatccatattctgtcgtcgagctcagtcggacaagtagacttcaactccgtcggatcttcagctgctgccgtcggacagtctatgcaggttgtcatgggaggtacgtcttc

SEQ ID NO: 511 - DNA, 674 bp, synthetic construct
  misc_feature 1..674: note = Description of Artificial Sequence: Synthetic polynucleotide
  source 1..674: mol_type = other DNA
gaagacttagcaggtgcaggagctggtggtggctacggaggaggttactctgcaggcggaggtgccggtgctggcagtggagctgctgcaggtgctggcgccggaagaggtggagctggcggctattccgctggagctggtacaggtgctggtgctgccgctggtgctggtacagctggtggatattcaggaggttacggtgctggcgcttcaagctcagctggttcttcctttatctctagttcgtccatgtctagttcccaagccactggttactcttcctctagcggctatggtggtggtgccgcgtctgccgcagctggagccggtgcagctgctggtggatatggtggtggttatggtgctggagccggcgctggtgccgcagctgcatctggcgctacaggtagggttgccaattctttaggtgcaatggccagtggaggtattaatgcattacctggagtgttttcaaatatctttagtcaagtttctgctgcctctggaggtgcatctggtggtgcagtattggtccaagcactaacagaagttatcgcattattgttacatattttatccagtgcttccattggaaacgtgtctagccaaggactggaaggatccatggccatagctcaacaagcaatcggagcgtacgctggaggtacgtcttc

SEQ ID NO: 512 - DNA, 587 bp, synthetic construct
  misc_feature 1..587: note = Description of Artificial Sequence: Synthetic polynucleotide
  source 1..587: mol_type = other DNA
gaagacttagcaggtgctgcctcttcccaagtcgtgtctaggaccactactacaacctcacaaagcgctgccggcggagctgcctctggttactctactggtgtaggaagtggtgctgccgcagccacctccggtgcaggttacggaggacaacgaggatacggtaccggagccggagccgcagctggagcagccgcttctggtacaggtgctggttacggtggacaagcaggctacggtcaaggtgcaggcgcatccgcagcagctgcagcctcagcggcatctaatagaattgttagtgccccagcggtgaacagaatgtctgctgcatcgtccactcttgtttccaatggcgcttttaatgtaggtgctttgggatcgaccatttccgatatggccgcccagattcaggctggaagtcagggtttgtctagcgctgaagctactgttcaagccctactcgaggtaattagcgtactgacacacatgttgtcaagcgccaatataggatatgttgatttcagtagagtcggtgatagcgctagtgctgtttcccaatcaatggcctacgccggaggtacgtcttc

SEQ ID NO: 513 - DNA, 518 bp, synthetic construct
  misc_feature 1..518: note = Description of Artificial Sequence: Synthetic polynucleotide
  source 1..518: mol_type = other DNA
gaagacttagcaggtggcccgggtggtccaggaggacctagaggagcttatgttccaggtgctggtggtttttccggcgtttcctcgggtgcgggtggtgtcagaggaggttccgtaatgccctccggtggatccggatctgcaggtccagtcactatcgtcgagaatattacagtaggtggaggtccatcgggaggttcgggtggagctgccggcggacaaacctaccaaacttatggtggtagtagcagactcccctctctagtcaatggattgatgggatccatgcaacctacgggatttaactaccaaaacttcggtaacgttctttctcaatatgctaccggatcgggtacatgtaattccaatgatgtaaatctgttgatggatgccctcatggctgctctacactgtttaagctacggatcaggttctgttccgtcaaccccgacttattctgccatgtcagcctacaaccaatctataagaaggatgttcacatactcaggtacgtcttc

SEQ ID NO: 514 - DNA, 671 bp, synthetic construct
  misc_feature 1..671: note = Description of Artificial Sequence: Synthetic polynucleotide
  source 1..671: mol_type = other DNA
gaagacttagcaggtggagctggtggaccaggagcaggtggtgttggtccaggcggcgtaggcccaggtggagtgggacccggaggtatttatggaccaggtggagcaggtggcttgtacggtccaggtgcgggaggagccttcggatctggaggcggtgctggtgcacctggaggtccaggtggtcctggcggcccgggaggacctggtggtttgggcggaggcgttggcggtgccggcactggtggaggtgtcggaccaggagtcggcggtgttggacctagtggaggagctggaggaacaggtccagtgtcggtgtcgtctaccattacagttggtggaggacagtcgtccggtggagttttgccctctactagttacgccccgacaacatcaggatacgagagactacccaaccttattaatggtatcaaatcttcgatgcagggcggaggattcaactatcagaatttcggtaatattttgtcacagtatgcaactggatctggtacatgtaattactacgacattaatcttttaatggatgctctcttagctgcactacatactcttaactaccagggtgcatcgtatgttccttcttatccatctccatccgaaatgctatcatatactgaaaacgtaagaagatacttctcaggtacgtcttc

SEQ ID NO: 515 - DNA, 521 bp, synthetic construct
  misc_feature 1..521: note = Description of Artificial Sequence: Synthetic polynucleotide
  source 1..521: mol_type = other DNA
gaagacttagcaggtggttatggcccaggcggatccggatcaggtggtgtaggcccgggtggttatggacctggtggatcgggtggtttctatggacccggaggaagtgaaggaccctatggtccttcaggcacctacggatctggaggtggatacggccctggaggagctggaggtccatatggaccaggatctccaggtggagcttatggtccaggttcgccaggaggagcttattacccttcctctcgagtccctgatatggtaaacggcattatgagtgccatgcaaggtagtggttttaattaccaaatgtttggaaatatgctttcgcaatatagttccggctctggaacttgtaacccaaataatgtaaatgtgctaatggatgctttattggcagctctgcattgtttatccaaccacggcagctcaagcttcgccccaagtccaactccagctgcaatgtctgcatacagtaatagtgttggacgtatgttcgcatactcaggtacgtcttc

SEQ ID NO: 516 - DNA, 506 bp, synthetic construct
  misc_feature 1..506: note = Description of Artificial Sequence: Synthetic polynucleotide
  source 1..506: mol_type = other DNA
gaagacttagcaggtgccggaggatcaggcccaggaggtgccggtcccggaggagctggtccaggtggtgctggacctggaggtgctggtcctggtggagtgggtccaggcggagctggcggaccatatggtagcggaggattcggcttcggaggagccggtggtagtggaggaccttatgtcccaggaggcgcttatggagctggatctggtaccccttcgtattctggctcaagagttcctgacttagttaacggcattatgagatctatgcaaggcagtggatttaactatcagatgtttggtaatatgttgagcaagtacgcctcaggatcaggtgcttgcaattcaaacgatgttaatgtcctaatggatgcattactggctgctttgcactgtctctcatctcatggatcaccgtctttcggctcctctcccactccaagcgccatgaacgcctattcgaattctgtgagaagaatgttccaattttcaggtacgtcttc

SEQ ID NO: 517 - DNA, 647 bp, synthetic construct
  misc_feature 1..647: note = Description of Artificial Sequence: Synthetic polynucleotide
  source 1..647: mol_type = other DNA
gaagacttagcaggtggttctggaccaggaggtgccggaggcagcggtcctggaggtgcaggaccgggtggtgtgggtccaggtggatccggaccgggaggtcttggatcaggaggttccggaccaggtggtgtaggtccgggaggttctggtccaggcggagtcggacctggtggttatggacctggaggatcaggaggattatatggacccggatcttacggaccaggcggttctggtgtcccttacggatcttctggaacttatggatccggtggtggttacggacctggaggtgctggtggagcttacggaccgggttcgcctggaggtgcatacggccctggatcaggaggctcctattacccttccagcagagtaccagacatggttaacggtatcatgtccgctatgcaaggatccggattcaattatcagatgttcggaaacatgttgtcacaatactcctcaggttccggaagctgtaatcctaataatgttaacgtactaatggatgctcttttggctgctcttcattgcctgtctaatcacggttcctccagttttgccccatctccaaccccagccgccatgtctgcgtacagtaactctgttggtcgaatgtttgcatactcaggtacgtcttc

SEQ ID NO: 518 - DNA, 539 bp, synthetic construct
  misc_feature 1..539: note = Description of Artificial Sequence: Synthetic polynucleotide
  source 1..539: mol_type = other DNA
gaagacttagcaggtataaacgttgattcagacattggctctgtttccagcttgattttgtccggaagtacattgcagatgaccgcatctggtaaaggttcctaccctggaggagaaagtagtcaattcagtggtttggactctaatatcggcctggttggtacacaggatgttgctataggcgtgagtcaacctgtggatatctctttaaacaatatcctggactcccctcaaggattaaaaagtccacaagcatcttcgcgcattaaccgattatcctcctcggtggttaatgccttaggtcctaacggtctagacattaataactttagcgacggtttgcgcactactctgtcacagttgtcatctagcggactgagtaaaaaggaggctgctatcgaaactttaatggaagccatggttgcccttctgcaagtgcttaactctgcacaggtgaatcaggttgatacaagcagcacagtagttacctctagcagcttggctaaggccctgtcctccttgttttcaggtacgtcttc

SEQ ID NO: 519 - DNA, 533 bp, synthetic construct
  misc_feature 1..533: note = Description of Artificial Sequence: Synthetic polynucleotide
  source 1..533: mol_type = other DNA
gaagacttagcaggtggcggagttggatctttcggaggacaaacttcatttggtcaaacctcgggtttgacttcctcagctgcttcgcaatctgacttcactcaagcctcaggatttgtgagttcggcaacaagccaaggcgcgtttggtcagacatccggtatcgcctcttttggcgctggaccaagtacaggacttagtgttagaagcacgttaaactcccctaatggtttgagaagcggttctgccgctgcgagaatctctcaactgacttccagcgtaaggaacgcgataggcccgaacggagtggatgctaacgcactggctagatctctacaggcttcgtttagtagtcttagatcttcaggaatgagttcaagtgatgccaagattgaagttttgttcgaaactatagtcggtctattacaacttttaagcaatacccaaattcgtggagttaatatggctactgctagctcagtggccaacagcgcagcccgatcatttgagcttgttcttgcaggtacgtcttc

SEQ ID NO: 520 - DNA, 500 bp, synthetic construct
  misc_feature 1..500: note = Description of Artificial Sequence: Synthetic polynucleotide
  source 1..500: mol_type = other DNA
gaagacttagcaggtgctggatatacaggacctagtggtccatcaacaggtccaagtggataccctggaccactctcaggaggagcatcgtttggttctggacaatcaagttttggtcagacttcagcattctctgcttcgggagcaggccaatcggctggagttagtgtaatttcctcactcaactctcctgtgggcctgagatccgcttcagctgcttcaagactttcacaactgaccagcagtatcactaacgccgtcggtgcaaatggtgtcgatgccaacagcttagccagatctcttcaatccagcttttccgctttgcgatcgtctggtatgtctagttcagacgctaaaatcgaggttttattagagactatagttggtttgttacagttgttatcaaacactcaagtcagaggagtaaatcccgctactgcatcttcagttgcaaacagtgccgctagatcctttgaacttgttttagcaggtacgtcttc

SEQ ID NO: 521 - DNA, 500 bp, synthetic construct
  misc_feature 1..500: note = Description of Artificial Sequence: Synthetic polynucleotide
  source 1..500: mol_type = other DNA
gaagacttagcaggttttgcaagagcatataccggtccacaaatatctcaacctgcaccacttggagtgggcccacaagtttcccaaccaaggccactaggtgtagcccctcaaacctccggtgcacgaccatttggaggtgtcactggtccttctgcaggaataagtttgggttccgcattgaatagtcctatcggtcttagatccggtctagcagcagccagaatctcacagctaacaagttctttgggaaacgcaatcacaccttacggtgtggatgctaatgctttagcatcttctttacaagcttcattttcaacattacagtcctcgggtatgtctgcctcagacgccaagattgaggttctgctggaaactattgtcggtttactacagttgttgtccaacacccaaattaggggagttaacatggcgaccgctagctcggttgcttcgtctgcagctaagagtttcgagttagtactttcaggtacgtcttc

SEQ ID NO: 522 - DNA, 662 bp, synthetic construct
  misc_feature 1..662: note = Description of Artificial Sequence: Synthetic polynucleotide
  source 1..662: mol_type = other DNA
gaagacttagcaggtgcctctgctgcagatattgccactgcaatcgctgcttctgtcgccactagcctactttcctcgggttatctatcagattcaaatgcttctcaactcggtaattctctggcatcctctatctcttcagttgcattgaacgttgctgctgacttgggtgtctctttaagcgcaagtgcaaatttgtcgagctcacttggtgctagtgcaggtatatcctcctcattcgacgctagttccgcttcttccacatctctatcttcgtcgtcatctctctcttcgcaacaacaagtgacatcaagtgcagctgtatccttaaactccgttataactagtcctgtaggattggcgtccccacaggcctcgtctagagtcaggtatctgtcacaattggctttgaacgctatatcaccgcagggattcaatgtcgaagctttcgtatctcaattgggaacaatcatggcccaagctagagcaatgggtatgtcggcttctgacgctacgatagaaactttactcgaaggtttgcttagcctggtccaagcgttaggctcctgtcaggcaggtagttataatccagcaagatccgcggaagcctcaaacattttcctcagtgctattcagtctacgttgagttcaggtacgtcttc

SEQ ID NO: 523 - DNA, 488 bp, synthetic construct
  misc_feature 1..488: note = Description of Artificial Sequence: Synthetic polynucleotide
  source 1..488: mol_type = other DNA
gaagacttagcaggtccaggatacggttatgcagcctattacgcaagttcatatggttacggacctggagttggatctggagcgggagctggatccggttcaggcgctggcagtgcagccggtgccggcagtggtagcggagccggcgcaggtcgagacgtgaccaatactgttgttaactctgtctctagattgtcgtccccttctagttccagcagagtttcatccgcagtttccggattgttaccaaacggaaacttcaacttgggtaacttaccaggtattgtttctaacttgtcctcctctattgcgtcctcaggtttatctggttgcgaaaatcttgtacaagttcttatcgaggtcgtcagcgcactggttcacattctaggttcggctaacatcggtaatattaatatgaatgctgcttccagtactgcagccgccgtaggccaagccattgtcaatggattgtattcaggtacgtcttc

SEQ ID NO: 524 - DNA, 731 bp, synthetic construct
  misc_feature 1..731: note = Description of Artificial Sequence: Synthetic polynucleotide
  source 1..731: mol_type = other DNA
gaagacttagcaggtaaagcgatttcctcttctgcagcatccgcagctgcatctgcgtcggctgcttcagctgccgctacagcctcggctgcagcaagctcaagcgcttcaactacaagaacaactggagcaacgtcggcagccggtgatttctcagttgtggccgacgccagcgcagattcctcagtcttagctgatgaagctgctagaggagccgtcggtgccgtgtccggaggcggagccgcctcccgctcggtaggtttgattggatctggtttcccgggatatgtttcttctgctccattctcactcatttcttcagtggcaggtggtggtggaagttctccagtgcctgtctcaccactcgccggaggtttgctaccaccatcaagttatctgtcctccccagcagccgctgagagaattagttcagtgattccacttctattatcaggtattagtccaaatagattagatgcctcgttgcttggcaacactctgggtagcttggtcgcacaagtttctttgaatcgtgcaggattgtcattttcacaaatcattgtagaagcactattggaattgttgtgtggcgttatccagatcttaagtttcgccgaaattactgtagttaacacaggtacattatcgtcaaccagttttgccttggctcaagctatgtctgccgctgtgagaaatacctaccgtttccactcaactgtaggtacgtcttc

SEQ ID NO: 525 - DNA, 509 bp, synthetic construct
  misc_feature 1..509: note = Description of Artificial Sequence: Synthetic polynucleotide
  source 1..509: mol_type = other DNA
gaagacttagcaggtggatacggaccaggcagcggacagcaaggacctggtcaacaaggtccaggtcaacagggccctggtcagcaaggtccctacggagccggtgcttcagctgctgcagccgcagctggaggatacggtccaggtagcggacaacagggtccaggtgtgagagtagcagcccctgtggctagtgccgctgcttcccgtctcagttctagcgccgcatcttcaagggtttcttcggcagtctcttcacttgtttcttcaggaccaacaactccagctgctttatccaatacaatatcttcagctgttagccagatttctgcatcaaatcctggactaagcggttgtgacgtgttggttcaagctttgttagaggtcgtttctgctttggttcatatccttggatcttcaagtgtcggtcaaatcaattacggagcatcagcacagtatgcacagatggtgggtcagagcgtaacacaagccttggtaggtacgtcttc

SEQ ID NO: 526 - DNA, 446 bp, synthetic construct
  misc_feature 1..446: note = Description of Artificial Sequence: Synthetic polynucleotide
  source 1..446: mol_type = other DNA
gaagacttagcaggtggagccggaggtgctggtcaaggtggtttaggcgctggtggagctggacagggcggttacggcggaggagcctatggaggtcaaggagcagcttcctctgctgctgcagcctctgcagccgctagccgtctctcttcgccttctgccgcaagtagagtctcaagtgcggtttcttcattagttagctccggcggaccaagttcaccagctgccctgtcctcgactatctctaatgtagtctctcagatttcagcttccaatccaggattgtcaggctgtgatgtactagttcaagcattgctggagattgtctcagctctagtccacattctgggaagtgctaacattggtcaagtaaactcgtccgctgcaggacaaagtgcgagtctagtcggacaatctgtctaccaggccctgtcaggtacgtcttc

SEQ ID NO: 527 - DNA, 482 bp, synthetic construct
  misc_feature 1..482: note = Description of Artificial Sequence: Synthetic polynucleotide
  source 1..482: mol_type = other DNA
gaagacttagcaggtggttatggaccgggagcaggtcagcaaggaccaggaggtgcgggacaacaaggcccgggaggtcaaggaccttatggaccatctgttgccgcggccgcgtccgctgccggcggatatggacctggtgcaggtcaacaaggtccagtagcatctgctgcagtctctaggttatcttcgccacaagcttcttcgagagtttcctcggctgtttcaagtctagtctcttcaggtccaacaaatcctgctgctttgtctaatgctatgtcctcagttgtctcacaagtttcggcctctaatcctggcttgagtggttgtgacgtactcgtacaagcactattagaaattgtgagtgccctggtccacattctgggttcatcttctataggccaaataaactatgctgcttcttcccaatacgcccaaatggtcggtcaatctgtggctcaagcattggcaggtacgtcttc

SEQ ID NO: 528 - DNA, 521 bp, synthetic construct
  misc_feature 1..521: note = Description of Artificial Sequence: Synthetic polynucleotide
  source 1..521: mol_type = other DNA
gaagacttagcaggtggctacggaccaggagccggtcaacaaggcccaggaggtgctggacagcaaggtcctggttcccagggtccaggtggcgctggccagcagggtcctggtggacaaggaccatatggtccctctgcagcagccgccgcaagtgccgccggaggatatggtccaggtgctggtcagcaaggccctgtcgcctcagcagctgcatctagactttcatcccctcaagcatcaagtcgtatttcatcggccgtctcttcactggtttcttcaggtccaactaatcctgctgctctttctaatgccatctctagcatcgtatcgcaggtatcagcttcgaatccaggattatcaggttgtgatgctttagtacaggctttgttagaaatcgtatctgctcttgtacatatcctaggttcttcaagcataggtcaaataaactatgctgcttcaagtcagtacgctcaaatggtcggtcaatctgttacacaagctctagtaggtacgtcttc

SEQ ID NO: 529 - DNA, 470 bp, synthetic construct
  misc_feature 1..470: note = Description of Artificial Sequence: Synthetic polynucleotide
  source 1..470: mol_type = other DNA
gaagacttagcaggtggatacggaccaagatatggtcagcaaggtccaggagctggtccatatggaccaggtgctggagctaccgcggctgcagcaggtggttacggaccgggagctggacaacagggtcctagatctcaagcaccagtcgcctcagcagctgctgctcgtttaagctcgccacaggcaggtagtagggttagcagtgccgttagtactttagtctcttctggacctaccaatccggctagtttgtcaaacgctatcggttcagttgtatctcaggtcagtgctagtaacccaggattaccaagttgtgatgttttggtgcaagctctcttggaaattgtttctgctttggtacacatcttgggcagcagctcaataggacaaattaactactctgctagttcccaatacgcgaggttggtcggtcagtccattgcccaagccttgggaggtacgtcttc

SEQ ID NO: 530 - DNA, 443 bp, synthetic construct
  misc_feature 1..443: note = Description of Artificial Sequence: Synthetic polynucleotide
  source 1..443: mol_type = other DNA
gaagacttagcaggtggtcaaggaggctatggaggtttgggaagtcaaggtgctggacagggcggatacggtggcggtgcttatggaggccagcaaggtgcagctgcctccgccgcagctgcatcagccgctgccagtagattgtcgtcccctggagccgctagccgagtctcatctgcagtgacttcattggtatcatcaggaggtccaacgaactcagctgctttgtccaacactatatccgacgttgtttcccagatatcagctagtaatccaggattatccggctgtgacgtgttagtccaagcacttttggagatcgtttcagctctggttcacattctgggaagtgcaaatataggtcaagtcaactccagttccgccggtcaatctgccagcttagtgggtcagtctgtataccaagcattatcaggtacgtcttc

SEQ ID NO: 531 - DNA, 386 bp, synthetic construct
  misc_feature 1..386: note = Description of Artificial Sequence: Synthetic polynucleotide
  source 1..386: mol_type = other DNA
gaagacttagcaggtggttacggaccaggtgcaggtcaacaaggacctggatcacaagctcccgttgcatcggcagcggcttccagattatcttcaccgcaagcttctagtagagtttcttcggccgttagtacattggtgtccagtggtcccaccaacccagctgccctgtctaatgcaatctcttctgtcgtgtctcaagtttcagcctctaacccaggactctcaggctgtgacgttttagtccaagctctacttgagctcgtcagtgccttggtgcatatcctgggaagtagttctataggacaaataaattatgccgccagcagccaatacgctcagatggttggaaactcagttgctcaggcattgggaggtacgtcttc

SEQ ID NO: 532 - DNA, 512 bp, synthetic construct
  misc_feature 1..512: note = Description of Artificial Sequence: Synthetic polynucleotide
  source 1..512: mol_type = other DNA
gaagacttagcaggtggatatggaccaggtgctggtcaacaaggtcctggtagccaaggtccaggctccggtggccagcaaggacctggtggtcaaggaccatatggtccatcagccgccgccgcagcagctgctgccggtggatacggtccaggagcaggacagcaaggtccatcttcacaagccccagtagcttcagctgcagccagtcgattgtctagtccacaggcctctgctagagtaagtagcgctgtaagtaccctcgtgtctagcggtccaacatcccctgccgctctctctaatgccatttcttctgttgtctctcaagtctcagcaagcaatcctggtcttagtggttgtgatgttttagttcaggctctcctggaaattgtgtctgctttggtgcacatattgggtagttcgtccataggtcagataaactacgcagctagtagtcaatacgctcaaatggttggtaactccgttgcgcaagccttaggaggtacgtcttc

SEQ ID NO: 533 - DNA, 536 bp, synthetic construct
  misc_feature 1..536: note = Description of Artificial Sequence: Synthetic polynucleotide
  source 1..536: mol_type = other DNA
gaagacttagcaggtggccaaggaggtagaggtggatttggaggtttgtcctcacaaggcgctggaggtgctggtcaaggaggatctggtgccgctgcagccgctgccgccgccggtggagatggtggatctggattaggtgattatggagccggcagaggttacggtgccggcctcggtggagcaggtggtgcaggcgtggccagtgcagctgcttctgctgccgccagtagactgtcatccccaagtgcagctagcagagtcagttctgctgtcacttctttgatatctggtggaggccctactaatccagctgctttatccaacactttcagcaacgtcgtttaccaaatctctgtgtctagtcctggattaagtggttgcgacgttttaatacaggctctactggaacttgtatccgctttggttcatattctcggttcggcaatcattggacaagttaattcctctgcagctggtgaatctgcgagccttgtcggtcaaagtgtataccaggctttttcaggtacgtcttc

SEQ ID NO: 534 - DNA, 554 bp, synthetic construct
  misc_feature 1..554: note = Description of Artificial Sequence: Synthetic polynucleotide
  source 1..554: mol_type = other DNA
gaagacttagcaggtggacagggaggccaaggtggctatggcggcttaggatcccagggagccggacagggtggttacggccagggtggagccgctgccgcggctgcgtccgccggaggtcagggtggccaaggtggttacggtggattaggctcccaaggtgctggacaaggtggatacggcggtggagcattttccggtcaacaaggtggtgcagcttctgttgctacggcatctgccgctgcatccagactttcctctcctggagccgcctccagagtcagttctgcagttactagtcttgtttcaagtggaggcccaacaaactctgccgcattatccaatacaattagcaacgttgtaagccaaatttcctcaagcaatccgggtctgtctggatgcgacgtactcgtccaagcacttttggaaattgtctctgcactggtgcacattctaggctccgccaatattggtcaagttaacagttccggagttggtaggtcagcatccattgtgggacaatcgattaatcaagccttttcaggtacgtcttc

SEQ ID NO: 535 - DNA, 389 bp, synthetic construct
  misc_feature 1..389: note = Description of Artificial Sequence: Synthetic polynucleotide
  source 1..389: mol_type = other DNA
gaagacttagcaggtccaggatatggaccaggcgcaggacaacagggcccaggatctcaagcacctgttgcttctgccgctgccagtaggttatcgagcccacaggcttcatccagagtgtctagtgccgtttctacacttgtctcatcgggtcctacaaatccagcatctctctctaacgcaatttccagcgttgtgagtcaagtctcttctagcaatcctggattgagtggttgcgacgtcttagtgcaagcacttcttgaaatcgtctcagcattggtgcatattctgggttccagttcaatcggtcaaataaactatgctgcttcctcccagtatgcacagttggttggccaatcccttactcaagctttgggaggtacgtcttc

SEQ ID NO: 536 - DNA, 683 bp, synthetic construct
  misc_feature 1..683: note = Description of Artificial Sequence: Synthetic polynucleotide
  source 1..683: mol_type = other DNA
gaagacttagcaggtgccgcttctagtgctgctgtgggcgcagctgctacctcgggtgccgccacctctggagctgcaactagcagttcaagtgcgactggcgttggtggatccgtttcttccggagcatctccagcctctgcaggaaccgcaactggaggaggaatttctttcctacctgttcaaactcaaagaggcttcggactagtcccgtcgccaagtggtaacattggagccaatttcccaggatcaggtgaattcggcccttccccattgacttcaccagtttacggaccaggtatcttgggaccaggactggttgttccatcattgcaaggtttgctaccaccattgtttgttttgccttcaaattcagctacggagcgaattagtagtatggtatcaagccttttgtcagcagtctcttctaacggactggatgccagctcctttggtgacactattgcttctttggtttcccagatatccgtcaataactctgatttgtcctcgagtcaggttttgttggaggcactactggaaatattatcaggtatggttcaaatactttcgtacgccgaagtgggaaccgtgaatactaagactgtatccagtaccagcgcagcggtggcccaggctatttccagcgctttttccggaaatcaaaattcaggtacgtcttc

SEQ ID NO: 537 - DNA, 572 bp, synthetic construct
  misc_feature 1..572: note = Description of Artificial Sequence: Synthetic polynucleotide
  source 1..572: mol_type = other DNA
gaagacttagcaggttctggcgcagcaagagctgctcagacagcttccgctgcaagtgcagcctctgccagctcaagcttggctcagttgggaagtgccctagcacaatcttcttctttcgctgcagctttcgaccagggtaattccgccgctagtgccgctgctatagcttacgtccttgctcagagtgccgcaaacaaggtgggtttgagttcttatagtgcggctataagcaatgctgcctccgctgcagtcgaatctgttggtggttatgcatccgctagcgctcatgcttttgctttcgcttcggccgtttcacaggttctgtctaactatggattgataaacttgtctaatgctttgtccttggcaagttccatagctaacgctgttagcgcttctgctagttcagctgcagccgtgtctagtgctgcagcagctacaggtgctacctctagtgcagcagtcggagcagccgctacctgtggtgctgcaacatctgcatcaagtgccacgggagttggagaaacagtagcatgtgcaactagcccagcctcaacaggtacgtcttc

SEQ ID NO: 538 - DNA, 578 bp, synthetic construct
  misc_feature 1..578: note = Description of Artificial Sequence: Synthetic polynucleotide
  source 1..578: mol_type = other DNA
gaagacttagcaggtactgcagctggtggtggaatttctagcttacctgtacaaactcagcctggattcggtttcttgttgtctccttctggaaacattggcccatccgttagcggcagcggtggttttggaccttccccattaccatctcctgcctctgatggctttagtccgtccccactcccatcccaagtttatggaccaggaatattgggacctggtttagtagccccttcgctcgaaggtctgttgccaccactgagtatcctaccttctgattcagctaatgagcgtatcagctccgttgtcagttctctcttggctgctgtatctagcaacggtttggatgcaagttcactaggtgataatctcgcaagcttggtttcccagatcagtgctaacaatgctgacctgtccagtagccaagttatggtggaggccttgttggaagtcctaagcggtatagttcagatcttgagctatgccgaagttggtgccgtgaatacagaaaccgtttcgtcaacaagttccgcagttgcccaggcaatatcatctgctgttttaggaggtacgtcttc

SEQ ID NO: 539 - DNA, 551 bp, synthetic construct
  misc_feature 1..551: note = Description of Artificial Sequence: Synthetic polynucleotide
  source 1..551: mol_type = other DNA
gaagacttagcaggtagtggaggatatggttcacaaggagcaggccaaggaggccaacagggtcgtggtcaaggtggtcaaggtcaatatggcccaggagagggcgagcaggttccaggccaaggaggtcaaggtccagcagcttctgccgctactgcttcagcaggaggacccggtgaatacggaggtcagcaaggccctggacaaggtggacaacaacaaccaggtcaaggcggacaaggcccatctgctgctgccgctgcctctgctgctgtaggtagcggaggatacggttctcaaggtcaacagggacaaggaggacagggacctactgcttccgcagctgctgctgcagcttctgttgctggtccaggtggttacggcgcttccggacaacagggtcctcgtcaaggatcgcaacaaggaagattcggaccagcagctggacaacaaggaccaggacagacgggacaaatgggcccaggtcagcaaggtccaagcggaccgtcatcggctgccgccgcttccgctgcagccgcaggtacgtcttc

SEQ ID NO: 540 - DNA, 452 bp, synthetic construct
  misc_feature 1..452: note = Description of Artificial Sequence: Synthetic polynucleotide
  source 1..452: mol_type = other DNA
gaagacttagcaggtggtccgggcggatacggtggtccaggtcaacaaggtggtggccaacaagccccggtccaaccgcgaccatacgttccaggaatgtcaggtcagatagtgacatcagacgtttcatcaaccgtatccagcgccgtttctagaatgtctactccaggctctggttcgagaatttctaatgcagtgtctaatattcttagttccggagtatcgtcaagtagtggcttaagtaatgtcatcagtaatttgtcctcttcaatttccacatccaatcctggactatctggttgcgacgttctggtacaagttttactggaagttataagtgctctagtacacatcctgagttccgcttctttaggtcaagtgggatcttctccacagaatgcacagatggtcgctgccaacgctgtggcgaacgcattttcaggtacgtcttc

SEQ ID NO: 541 - DNA, 449 bp, synthetic construct
  misc_feature 1..449: note = Description of Artificial Sequence: Synthetic polynucleotide
  source 1..449: mol_type = other DNA
gaagacttagcaggtccaggaggctatggaggtcctggtcagcagggtggtggacaacaagcaccagtacagccaagaccatatgttcctgttacaagtggtcaaattgtgacaagtgacgtaagttccacagtttcatcggccgtttccagaatgtcaacccctggatccggatctagaattagcaacgccgtctccaacattttgtcctcaggagtctcatccagttccggattatccaacgctattagtaacattagttccagtatctcggcatctaatcctggactatcgggatgtgatgttcttgttcaagttcttttagaggtaatttcagcactggtacatatattgggctcagcatcagttggtcaggtgggttcatctccacaaaatgcacagatggtcgcagcaaacgctgttgccaatgctttctcaggtacgtcttc

SEQ ID NO: 542 - DNA, 617 bp, synthetic construct
  misc_feature 1..617: note = Description of Artificial Sequence: Synthetic polynucleotide
  source 1..617: mol_type = other DNA
gaagacttagcaggtgctggtggtgactctggcctattcttatctagtggagactttggccgcggcggtgcaggagccggagctggtgctgcagccgcttcagctgcagcagctagtgctgcatcggccggtgccggcagaggtacaggttttggagaaagaatactaataggcggttcaagaggattcggtggcgccagggttgatgctcctgcagcatcaactgcttctgcaagtgctgcggctgcgtcctctggcgctggtggcggctctaggtttggtggattaggagtgggagtatttggtgccggatcgggtgaactgagtgttgcttcacgcataagcactatggcttcttctatgtcatcactgttatcctcgaatttctcaccagttattttttcctctcttgctaacgtaattgcaaatggtgcttctgctatagcagtcgctcatccagaattatctggtgcaggcgtgttaacagaagcattactggaagcattggtggccttctgctacgcacatgcgggatcaatcgcctccgcttctgatgtcaacttagcagtgacaacactcgcatctaccatgcaaggttccctgccaggtacgtcttc

SEQ ID NO: 543 - DNA, 434 bp, synthetic construct
  misc_feature 1..434: note = Description of Artificial Sequence: Synthetic polynucleotide
  source 1..434: mol_type = other DNA
gaagacttagcaggttctggacagggtgcgtctttcggaatatcccaacaatttggagctcctagtggagctgcttcctccgcagctgcagctgccgctgccgcggccggagctagctccccaggtgccttgctggtttctgccgatgcaccatccagaatagctagtgtgtcatcatctttaaactccgtcgtctcttctggcgcttctgcatcttctttcgcctccattgcgacccaaatcgctgatgttgcaggtcaagtgtctagtgttcaccctgagctctcatccttggaagtactcgtagaagctctgatcgaaatcattgttgcactagtgcacgcacagtcaggaggagcgtcaagtgcaagtgcgtccgcttcagcatcagctctggccagccaactaggacagcttttcggaggtacgtcttc

SEQ ID NO: 544 - DNA, 527 bp, synthetic construct
  misc_feature 1..527: note = Description of Artificial Sequence: Synthetic polynucleotide
  source 1..527: mol_type = other DNA
gaagacttagcaggtggagctggagccggtcagggtggttacggaggacaaggaggattgggtggttatggacaaggagcgggtgcaggagcaagcgctgcggcttctgcttccggtgctggtagtggtcaaggaggatatggaggacagggtggatacggtcagggaacaggtgcaggtgctgcttcaagcgctggtgtcgcagtaactgttggaaacactgtctctagactatcatccccacaagcggcttctcgtgtttcctcagctgtttcatccttagtatccaacggacaagtcaatgtcgcagcattaccaagtataatttcctctctgtcgtccagcatatctgcttcgtcgactgccgcaagtgactgcgaagtgctggtgcaagttttgctggagattgtctccgctcttgttcagattgtctcaagtgccaatgtcggttacataaatcctgaggcatctggatctctcaacgcagtcggctccgccttagctgctgctatgggaggtacgtcttc

SEQ ID NO: 545 - DNA, 518 bp, synthetic construct
  misc_feature 1..518: note = Description of Artificial Sequence: Synthetic polynucleotide
  source 1..518: mol_type = other DNA
gaagacttagcaggtcagggcggtcagggaggttacggacgacagtctcaaggagccggatcggctgcggctgccgcggcagccgcagcagcagctgccgctgcaggaagcggtcaaggcggatatggtggccagggacaaggaggatatggtcaatcttccgcttctgcctcagcagcagcctcggcagcctcgaccgtagccaattcagtctctaggctgtctagcccatcggccgtctccagggtttctagtgctgttagctctttggtatcaaacggccaagttaacatggcggctttacctaacattatatctaatattagctcatctgtctctgcttccgctccgggtgcttcaggctgtgaagtgattgtacaggctttacttgaagtaattactgcactagttcaaattgtctcatcgagttcagttggatatattaacccatcagcagtgaatcagattaccaatgtcgtggctaatgctatggcacaggtcatgggaggtacgtcttc

SEQ ID NO: 546 - DNA, 527 bp, synthetic construct
  misc_feature 1..527: note = Description of Artificial Sequence: Synthetic polynucleotide
  source 1..527: mol_type = other DNA
gaagacttagcaggtggtcagggacaaggtggatttggtcagggaaccgttggaaatgccgctgccgcagctgccgctgctgctgcggccgcagccgctcaacaaggaggacagggcggtttcggtggccaaggccagagaggattcggacaacgtgcagcttctgcagtcgcctctgccgcatcggctgcagacgtcggcaataccgtagctaacaccgtttcccgattgagctcaccatctgctgctagtagagtaagttcagcagtggctaacttggtcagtaacggccaactaaatatggccgctttgccatatataataagtaatattagtagttccgtatctgcaagcgttcctggtgcgtcaggttgtgaggtcatcgttcaagctttattggaagtcgtagcagctttatgccaaatcgtttcatcctccaacgttggatacattaatccgtcggccgtgaatgacatcacgaacgttgttgccaacgctatggctcaagttatgggaggtacgtcttc

SEQ ID NO: 547 - DNA, 527 bp, synthetic construct
  misc_feature 1..527: note = Description of Artificial Sequence: Synthetic polynucleotide
  source 1..527: mol_type = other DNA
gaagacttagcaggtgagagcggacaaggaggttatggaggtcgtggtcaaggaggatacggacagggagcaggcgcagccgctgctgctgccgtcgctgctgcagccgcagctgccggacaaggtggatttggaggtcttggcggttatggtcaaggtgccggttcagcaaccgctgccgccagctccgctgacgtctccacaactgtcgctaatagtgtatcaagactgagtagtgcttctgcagctagcagagtctactctgttgtatcaaatctggtttcaaacggtcaagtgaacattgctgcgttaccgaacattatctcaaacgtgagtagttcagtttctgcgtcagcaccaggtgcttctggatgtgaagttattgttcaagttttattggaaattgttgctgccctgacttctattgtctcttctgctagtgttggatatatcaatcaatacgctgtaaatgatataaccaacttggttgctaacgcaatggcaggcgttatcggaggtacgtcttc

SEQ ID NO: 548 - DNA, 365 bp, synthetic construct
  misc_feature 1..365: note = Description of Artificial Sequence: Synthetic polynucleotide
  source 1..365: mol_type = other DNA
gaagacttagcaggtggctacggtccaggtagcggtggttctccggcctctggagcagcatcccgcttgtcaagtccacaggctggtgcacgtgtttcatctgctgtgagtgctttagttgcgtccggaccgacatcacctgctgcggtaagttctgctatctccaatgtcgcctcccaaatatctgctagtaaccctggactttcaggttgcgacgtactggttcaagctctgcttgaaattgttagtgccctcgtctccatattgtccagtgcttcgatcggacaaattaattatggagcttcaggacaatacgctgctatgataggccagagtgttgcacaagcattagcaggtacgtcttc

SEQ ID NO: 549 - DNA, 554 bp, synthetic construct
  misc_feature 1..554: note = Description of Artificial Sequence: Synthetic polynucleotide
  source 1..554: mol_type = other DNA
gaagacttagcaggtgcttctggagctggtcagggtcaaggctacggacagcaagcacaagtctacaaccaaggtggctccggttctgttgctaccaccgctgccgctgcttcgggtgctgtaggagtgtcgcaaaactatgcgcaggctcccgtttactacggaggttcgagctccagttattcctcgtcaatcactagttactcatccagtgtgttgcctattgctattttgcagtcaccagctggtctaacctcatctgcagctggaagcagaatgtcaagcgtcgcgacctccattacttcacttatcccgagtaacggtagtccattcaactatagcgctttctccaatactttggccagtctgattaacaacattggtaattctaatcctggcttgtccagaaacgatgtgaccatcgaagctttactggaggtcatcactgccctgctacaggtgatctccaacggagaattgtcggctgctgctagctcttacgccgccgcaagcctacttcaaagcatccaacaaggttattcaggtacgtcttc

SEQ ID NO: 550 - DNA, 626 bp, synthetic construct
  misc_feature 1..626: note = Description of Artificial Sequence: Synthetic polynucleotide
  source 1..626: mol_type = other DNA
gaagacttagcaggtgcttacggtttcacccaagctgccgcatctgccgttgcttccgttttactgcaagctggtgtcctaaattatggaaacgctactgcactggcatctgcatatgcaagcgcttatgcttcatctgtggcgtccgctgcagcttctgcatcagccggtgcttctgcttcctcgggagcatcagcttacgcatctgctgttgcagcagctgcggctgccgcctctgttagcacctcagcaggcgctagtgcttccgctggagctagtggtctttccttctctcaagctcaagcaagtgccttgtctagttctgctgctgcttacagaattagttctttaattacttcatttgtgtctggtttgtcagcaggtggtggttcagtaaactactcagtgattgccaatgctcttgccagcgtcgcctcacaaatcagtgctagcaacgccggtctgtcagtttcacaagtagcagtccaagctttattagaattctcaactgcgttgattcaaatcttggcatcatcacagattggatacgtaaacactgcatccgctggatctacagcctctgcattttcacaagcactggcacagaccttcgcaggtacgtcttc

SEQ ID NO: 551 - DNA, 521 bp, synthetic construct
  misc_feature 1..521: note = Description of Artificial Sequence: Synthetic polynucleotide
  source 1..521: mol_type = other DNA
gaagacttagcaggtggagccggtcagggtggttatggcggactgggaggtcaaggcgcgggacaaggaggattaggaggacaaagagctggtgccgcggctgctgcggccggcggtgctggtcaaggtggctatggaggactaggatcgcaaggtgctggaagaggtggttacggaggcgtcggttccggtgcctccgctgctagcgcagccgcatctcgcttatctagtcctgaagcttcatcgagagttagcagcgctgtatccaacctagtttcctcaggtccaaccaattctgctgccctttcatctaccatctctaacgtcgtatcgcaaattagtgcctcgaatccaggattatccggttgtgatgtgcttgttcaggctttattagaggttgttagtgccctgattcaaatcttgggttcttcatcaattggccaggttaactacggaactgctggccaagctgctcagattgttggccaaagcgtttatcaggcattaggaggtacgtcttc

SEQ ID NO: 552 - DNA, 476 bp, synthetic construct
  misc_feature 1..476: note = Description of Artificial Sequence: Synthetic polynucleotide
  source 1..476: mol_type = other DNA
gaagacttagcaggtggagcaggtcaaggaggttatggcggattaggtggacagggagtgggaagaggcggacttggaggacaaggagccggtgccgccgctgcaggcggagcaggccagggtggttatggtggtgtcggcagcggcgcaagtgccgcttccgctgccgcgtctcgcttgagctcacctcaagcttcaagtcgtctatctagtgcagtctcaaaccttgtagctactggacctactaactcagctgcgctgtcgtctacaataagcaacgtcgtatcacaaataggtgcttctaacccaggtctgagtggatgtgacgtattaatacaagccctcttagaggtagtttcagccctaattcaaattttgggaagcagttcaataggacaagtgaattacggttcagctggacaagctacacaaattgtcggtcaatccgtgtaccaggccttaggaggtacgtcttc

SEQ ID NO: 553 - DNA, 515 bp, synthetic construct
  misc_feature 1..515: note = Description of Artificial Sequence: Synthetic polynucleotide
  source 1..515: mol_type = other DNA
gaagacttagcaggtccgggaggttacggacctgctcaacaaggcccttcaggtcctggaattgctgcctctgcagcaagcgccggtccaggtggatacggtcctgcacagcaaggaccagctggatatggccctggtagtgctgtcgctgcctccgcgggagccggttctgccggctacggaccaggaagccaagcaagcgctgcggcgagtagactggcctcaccagattccggagcccgtgtcgcttcggccgtgtctaatttggtttccagtggaccaacctcttcggctgccctatcatccgtaataagcaatgcggtttcacaaatcggagcatctaatccaggtttatctggatgtgatgttttgattcaggccttacttgaaattgtatctgcgtgtgttacaatattgtcctcttcgtctataggtcaagttaattacggagctgcttcacagtttgctcaggtcgttggacagtccgttttgtcagcattttcaggtacgtcttc

SEQ ID NO: 554 - DNA, 500 bp, synthetic construct
  misc_feature 1..500: note = Description of Artificial Sequence: Synthetic polynucleotide
  source 1..500: mol_type = other DNA
gaagacttagcaggtcctggtggatatggaccagttcaacagggaccttcaggtccaggatccgccgcaggcccaggaggttacggtccagcccagcaaggaccagcacgctatggtcctggatccgcagctgcggccgcagcagctgccggatctgctggatacggcccaggtccacaggctagtgctgccgcttcgagactcgcaagtccagatagcggtgccagagttgcctctgccgtttctaacctggtatcttccggtcctacatcttctgctgcgctttctagtgtgatttcaaacgcagtcagtcagatcggagcttcaaaccctggattaagcggttgtgatgttctgattcaagcccttttggagatcgtttcagcatgcgttaccattttgtcctcctcgagcataggtcaggttaattacggagctgcatcacaatttgcacaggtcgttggacaatctgttttgtctgctttttcaggtacgtcttc

SEQ ID NO: 555 - DNA, 482 bp, synthetic construct
  misc_feature 1..482: note = Description of Artificial Sequence: Synthetic polynucleotide
  source 1..482: mol_type = other DNA
gaagacttagcaggtggagctggtcaaggtggctacggtggattgggatctcaaggtgctggaagaggaggttatggcggtcaaggagcaggagcagcagccgctgccacaggcggtgctggccagggaggatacggaggtgtcggctcaggagcatctgccgcatcagctgctgcatcccgactttcatctcctcaagcatcgtcgagagtatcgagtgcagtatcaaatcttgttgcctctggacctactaattctgccgctttgtcgtccactattagtaacgctgtttcgcaaattggtgccagtaacccaggtctttcaggttgtgatgtactgatacaagctttattggaggttgtttctgctttgattcatattttgggtagttcttccattggccaagtaaactacggatcagccggtcaagcaacccaaatagtaggacaatctgtttatcaagccttgggaggtacgtcttc

SEQ ID NO: 556 - DNA, 515 bp, synthetic construct
  misc_feature 1..515: note = Description of Artificial Sequence: Synthetic polynucleotide
  source 1..515: mol_type = other DNA
gaagacttagcaggtggagcaggacagggaggttatggaggcttgggaggccaaggatccggtgccgccgccgctggtactggacagggtggatacggcagtctgggtggtcaaggagctggcgcagccggagctgctgcagcagcagttggtggtgccggtcaaggcggatatggcggtgtaggatccgctgctgcctcagctgccgcttcccgtttgtcatcaccagaagcctcatcccgtgtttcgagcgccgtctcaaacttggttagttctggacctacaaattctgctgccttgagcaacaccatcagcaacgtagtgtctcaaatttcatctagcaatcctggactaagcggatgcgacgtcctcgttcaagcactcctggaggttgtgtctgccctcatccacattctgggctcttctagtattggtcaagtgaactatggttcagcaggccaagcgacacagatagtcggtcaatcagtatatcaagctttgggaggtacgtcttc

SEQ ID NO: 557 - DNA, 482 bp, synthetic construct
  misc_feature 1..482: note = Description of Artificial Sequence: Synthetic polynucleotide
  source 1..482: mol_type = other DNA
gaagacttagcaggtggagctggccaaggtggatacggtggcctcggttctcaaggcgcaggtagaggaggttatggtggtcaaggagctggagctgcggttgcagccattggaggtgtcggtcaaggcggttacggaggtgtaggatctggtgcttccgctgcttcagccgctgcaagcagactttcttctcctgaagcatcaagtagagtatcttctgctgtttccaatctagtctctagtggtcctactaactctgctgctttaagctctacaatctcgaatgttgtatcccagattggtgcatcaaatcctggtttaagcggttgcgacgtgttgattcaagctctgctggaagtagtctcagccttggttcatatcttaggcagctcttcaattggacaagttaactacggatccgcaggtcaagctacccaaattgttggccagtctgtttatcaagcactgggaggtacgtcttc

SEQ ID NO: 558 - DNA, 449 bp, synthetic construct
  misc_feature 1..449: note = Description of Artificial Sequence: Synthetic polynucleotide
  source 1..449: mol_type = other DNA
gaagacttagcaggtggttccggaagaggtggatacggctcacagggtgcaggacaaggagctgcagctgctgcggccggaggtgccggtcaaggaggatacggtggtgcaggttctggagccgctgcagcctctgcagccgcgtctagattgtccagtcctgaagctagctctcgagtctcaagtgcagttagtaacctagtttcttcaggaccgactaactcagctgcgctgtcaaatacaatttcttccgttgttagccaaatatccgcttcaaaccctggtcttagcggatgcgacgtgttggtacaagccctccttgaagtcgtttctgcccttatacacattttgggatcttcatccatcggtcctgttaactacggttctgcgagtcaatccacgcagatagtcggacaatccgtttaccaagcattaggaggtacgtcttc

SEQ ID NO: 559 - DNA, 521 bp, synthetic construct
  misc_feature 1..521: note = Description of Artificial Sequence: Synthetic polynucleotide
  source 1..521: mol_type = other DNA
gaagacttagcaggtggctatggaccaggatcaggacaacaaggtcccggtggcgccggtcagcagggccctggaggtcagggaccttatggtcctggaagttcttccgctgcagccgtgggaggatacggaccatccagcggcttgcagggacctgctggtcaaggtccatatggacctggagctgcagcctcagcagctgccgctgctggtgcatctcgtctgtcgagcccgcaagctagttccagagtgagttccgcagtttcaagccttgtctcatccggtccaactaatagtgctgctctgactaacactatttcgagtgtagttagccaaatttcagctagtaacccaggtctatccggttgtgacgtcttaattcaagcactgctcgaaattgtatctgccctagtacacatactaggctacagctccattggacaaatcaattatgacgctgctgcgcagtatgcttctctagtcggtcaatctgttgcacaagccctcgcaggtacgtcttc

SEQ ID NO: 560 - DNA, 560 bp, synthetic construct
  misc_feature 1..560: note = Description of Artificial Sequence: Synthetic polynucleotide
  source 1..560: mol_type = other DNA
gaagacttagcaggtgttttgggaggtcaaggaggattgggtggcttgggatcgcaaggtgctggtcagggaggatacggtcaaggaggtgccggacaaggaggtgctgccgcagccgctgctgcagctgcagcaggaggactcggaggacaaggtggtcgaggaggacttggttcacagggtgcaggccagggaggttacggccagggtggtgctggtgcatcttccgcagcagctgcctcggctgctgcatctagattatcttccgcttctgctgcttctagagtttccagcgccgtctcatctttggtatcatccggtggtccaacgaactcagcggcattatcctcaacaatttcaaacgttgtctcccaggtttcagcgtccaatccaggcctttcaggttgtgatgtattggtacaggccttattagaaatcgtctcagctttagttcatattcttggaagttcatctataggacaagttaactataatgcagccggacaatccgcatccgttgtgggacagtcattttatcaagcattggcaggtacgtcttc

SEQ ID NO: 561 - DNA, 713 bp, synthetic construct
  misc_feature 1..713: note = Description of Artificial Sequence: Synthetic polynucleotide
  source 1..713: mol_type = other DNA
gaagacttagcaggtactggtcagggcggagtcggtggttacggtcagggtgccggttcgtccgctggtgccggaactggtggtgtcggtcaaggcggatacggatcttatggaagttcctaccaatcaacgagcggtatctctatcgcactctctacacaatcattaggtggacaaggtcagtacggccaaggtttgggagccggagcttccgcaggtgctggagctgccgttggtactggtctaggtcagggaggtctaggtggatacggacagggatccggtagtgcttccgccgctgcgtcgggttcaggttctgccattggtggatttggtggctatggtcaaggagctggcctaggagctggaaccgcagccgacgtaggcgctacggtaagtaatactgtttctagactgtcctccccagctgctaccagcagagtttcatcagcggtcagttcgcttgttgctaatggtgcacctaatttatcatctttaccaaatgtaatcagtagtttatccaactcagtgtccgctagtaccccaggcgcttctggatgtgaaatactggtgcaagtcctgatggaggtcgtcaccgcattggtacagatattatctagtgcaaacgtatcaagcgtgaacgccggtgacccatctcaagccgctatgactgttggtcaatctgtggcagccgctcttggaggtacgtcttc

SEQ ID NO: 562 - DNA, 647 bp, synthetic construct
  misc_feature 1..647: note = Description of Artificial Sequence: Synthetic polynucleotide
  source 1..647: mol_type = other DNA
gaagacttagcaggtgcttcttccaacgcaagttctgctgccgctgcagcttctacagttctagctggcgttgcaccagctggatcatccgcttctagttcagctgcctcagcatcaactggtgccggcgctgctatttcttccgtaggaccagccgttggattcggcgccggtcctgccccagcaggaggtttggtttcaggactaccaggctattcaccactgaatcagggctttacgccatacccgggagtacctttgccaactggatcaggtgtctcagcaccagtgcctgtatctcctctaccactcggtttgttaccttcatcgttggacttgtcatcacctagtgctaccggacgtatgtcatccctcgtacgttcattgctgagtgccgtcagttctggaggattgaactcgagtctcttgggatcaaccctgacttctctggtgtcgcaaatttcctcaagcaggtcggatttgtcggcatctcaagtcctggtggaggccgtgcttgaaatcctatccgctgtaatccaaattctatcaagtgctacaattggtgttgtatctaccgactctgtcggtgctacttcaagtgccgtggcacaagcagtttcttcggcgtttgccggaggtacgtcttc

SEQ ID NO: 563 - DNA, 449 bp, synthetic construct
  misc_feature 1..449: note = Description of Artificial Sequence: Synthetic polynucleotide
  source 1..449: mol_type = other DNA
gaagacttagcaggtggtttgggtggtggacaaggtggatatggatccggactaggaggagttggtcaaggaggccaaggtgcattaggtggtagccgtaacagtgcaactaacgctatatctaattccgctagtaacgcagtatcactactttcatctcctgcatctaatgctagaatctcctccgccgtatctgcattggcgagtggcgccgcctcaggtcctggttacttgagctccgttatctccaacgttgtttcgcaagtttcctcaaatagcggaggcttagtaggatgtgatactttggtccaggcactactcgaagctgcagctgctcttgttcacgttttggcttcttctagtggaggtcaagtaaatctcaatactgccggttatacttcacaaatggtgtcccagaccattgctcaagtctttgcaggtacgtcttc

SEQ ID NO: 564 - DNA, 437 bp, synthetic construct
  misc_feature 1..437: note = Description of Artificial Sequence: Synthetic polynucleotide
  source 1..437: mol_type = other DNA
gaagacttagcaggtggcctcggaggtggccaaggaggccaacagggcgctggtagaggtggtctgcaaggtgccggtcagggtggacagggtgccttaggaggatcaagaaactccgctgccaatgcggtttcgagacttagctcgccagcctctaatgccagaatctccagcgctgttagcgctttggcatcaggaggtgcaagctcacctggttatctgtcatcaataatttccaatgtcgtctcccaagtgtcctccaataatgatggtctttccggttgtgataccgtcgtccaggcattgttagaagtcgccgccgcacttgtccacgtcctagcttcaagcaatataggccaagttaatttgaatactgcaggatatacctcgcaaatggtttcgcagaccattgctcaagtgttcgcaggtacgtcttc

SEQ ID NO: 565 - DNA, 434 bp, synthetic construct
  misc_feature 1..434: note = Description of Artificial Sequence: Synthetic polynucleotide
  source 1..434: mol_type = other DNA
gaagacttagcaggtggaagcggcggtcaaggtggacagggcggttacggatctggaggacaaggtcaaggacagggtggatatggtagcggtgcggcttctgctgccgcggcagcatcctcatccgtcagccgtctccaatcccctgcttccagctcaagagttagttcggccgtatctactttggcctcagcaggagctgctaactcgggagctttgtccagcgtcatttctaatctgagctcttctgttgccagtgctcaccctgacttgtctggatgcgaattacttgtgcaaattcttcttgaggtgatcagtgccctagtcgcattacttggctcatcaacagtgggacctgtcgatattggtcaaagcagtcagtactctggtctggtcgcaaacgctataggtaatgctctcgcaggtacgtcttc

SEQ ID NO: 566 - DNA, 422 bp, synthetic construct
  misc_feature 1..422: note = Description of Artificial Sequence: Synthetic polynucleotide
  source 1..422: mol_type = other DNA
gaagacttagcaggtcctggtcaacaaggtccttatggaccatcccaacagggtccaggtagctacggtccatccggtcaagtttcatccgttagtgcctcagtttcttccgccgctagtagattgtcaagtccagctgcttcctctagagtctcatctactgtctctagcttggcctcatcgggaccgtctgacgccagtgtggtttcaagcgcattaagtaacttagtcagtcaagtatcagctagtcaaccaggtctgtccggatgcgacgtcatcgtgcaggctttgctggaactcgtttccgctttagtccacatcttgggtagttcttctctcggacaagttgactacaacggcgcatcttacagtgctcagaggctgtcccaagcattaggaaacactcttggaggtacgtcttc

SEQ ID NO: 567 - DNA, 431 bp, synthetic construct
  misc_feature 1..431: note = Description of Artificial Sequence: Synthetic polynucleotide
  source 1..431: mol_type = other DNA
gaagacttagcaggttccggagccggtgccggatcagccgctgctgccggtgcgggagttggagctgctggtggatatggaggtggagccggcgctggagctgtagcaggagcctcggcaggttcatacggaggagctgtcaacagactctcatctgcaggagccgcttcccgagtcagctcaaacgttgcagctatagcctcagctggtgcggctgctttaccaaatgttatctctaatatctacagtggtgttttgtcaagtggagtgagttcctccgaggcccttatccaggcattgttagaggtcatttcagcactgatacatgtccttggatcagcttccatcggtaatgtttcttctgttggtgtgaatagtgcattgaacgccgtccaaaatgctgtcggagcctacgctggaggtacgtcttc

SEQ ID NO: 568 - DNA, 398 bp, synthetic construct
  misc_feature 1..398: note = Description of Artificial Sequence: Synthetic polynucleotide
  source 1..398: mol_type = other DNA
gaagacttagcaggtcagggtggatatggtggaagcgcttacggtggccagggcgctactgcttcggctgcggcagcctcagctgctgccagtagattgtcctctccatccgcagcatctagagtttcttccgcagtctcaagccttgtgagcaatggaggtcctacatcaccagcagctttgagctctagcatttccaacgtggtatctcagatctctgcatcaaacccaggactttctggttgtgatatattggttcaagctctattagaaattatttctgcattagtgcatattctaggaagttcatccattggtcaggtaaacagctcgagtgccggacaatctgcctccattgtcggacaaagcgtgtatagggcactgtcaggtacgtcttc

SEQ ID NO: 569 - DNA, 524 bp, synthetic construct
  misc_feature 1..524: note = Description of Artificial Sequence: Synthetic polynucleotide
  source 1..524: mol_type = other DNA
gaagacttagcaggtggtccaggtggccctggtggtcgtggaggaccaggacgttcaggtggtagaggaggcctcgaaggtgctggtgcatcgggaggtttcggacctgtagcgggaggagcttcacccggagcaggtggttctggttctactactgtcaccgaagttgttagtgtgaccgtatccggaggacaacctagttcaggcgtgctgccgggtggctcttacacccctgccgccggtggatccgctcgtttaccttccctgataaatggaatcatgtcctctatgcagggtggaggattcaactatcaaaatttcggaaacgtcttatctcagttctccactggtaccggaacgtgtaatagtaatgacttaaacctgctaatggatgcactattagcagcattgcatactctatcgtaccaaggtatgtccactgtcccatcttacccatccccgtctgctatgtctagttattctcagtcagtcaggagatgctttggatattcaggtacgtcttc

SEQ ID NO: 570 - DNA, 386 bp, synthetic construct
  misc_feature 1..386: note = Description of Artificial Sequence: Synthetic polynucleotide
  source 1..386: mol_type = other DNA
gaagacttagcaggtgtcggaccgggaggtgcttatggtccaggtgccggaggactgtctggagtgtctagtggtgctggaggaattagaggtggtcaaacctacggaggatcttctagattaccatctttagtgaatggactcatgggatccatgcagccttctggtttcaactatcagaacttcggtaacgttatgtctcaatatgcaactggatctggtacgtgtaacagtaatgacgttaacttactaatggacgccctcatggcagctttacattgcttatcttacggatcaggatcggttccacctacccctacctactcggccatgtccgcttacaatcaatccataagacgaatgttcgcatactcaggtacgtcttc

SEQ ID NO: 571 - DNA, 386 bp, synthetic construct
  misc_feature 1..386: note = Description of Artificial Sequence: Synthetic polynucleotide
  source 1..386: mol_type = other DNA
gaagacttagcaggtcagcagggttactcatctagctcaagcgctggcgctagctctgccgcaacggccagcgcagccgcttctagactcagtagtaccgattccagttcacgagtatccagtgctgtatctagcctggtcagtaatggaccttctaacccggtggccttagctaatgctgtttctcgtgttatgtcgcaagtgaatgcttcctcttctggtttatcagaatgcgacgttttggtgcaagctttgctcgaaatcttaagtgccctggtacatatacttggaagcgctactgtcggcgaagttaattacgacgctacatcacaaaccgcacaaatggtcagccagactatagctcaggtattcgcaggtacgtcttc

SEQ ID NO: 572 - DNA, 419 bp, synthetic construct
  misc_feature 1..419: note = Description of Artificial Sequence: Synthetic polynucleotide
  source 1..419: mol_type = other DNA
gaagacttagcaggtccaggaccgcagggtccatctggtcctggtccacaaggtccttctcctcaaggaccaagcagtggatatgatcagtcggtcgtaattagctcagcaagttcccgtttgtcatctcctagtgcgacttcccgtatctcttcggcaatttcaacgctaaagacttcgggtcctagaaacccagtgggattgtcaactgccttaggtaatatcctaagccaaattcaattgacaaatcccggtctgtcgggttgcgaatctttagttcaggcccttttagagattgtgtcagctctgatccaaatcttatctgtcagtagtgtaggacctgttgatttctccgctactggacaaagtgccgctatcgtgggacaagctttgatgcaatcactaggaggtacgtcttc

SEQ ID NO: 573 - DNA, 485 bp, synthetic construct
  misc_feature 1..485: note = Description of Artificial Sequence: Synthetic polynucleotide
  source 1..485: mol_type = other DNA
gaagacttagcaggtggagcagcaggttccggagttggatacggtggtgcttcaggtgttgttactagttcctcaagcgcttccgcaggaggttcgggtatcataacttatggtggttatggatatggagctggtgctgctgcaggtgccggtgctggtgccgtcgccggttcctatggaggcgcagttaatagacttagttcagctgaagctacgaaccgtgtctcaagcaatgtcggagcaatagttagcggtggcgtgtcagcactaccatcggtaatttcgaacatcttttcaggagtgaatgcatcggctgcaggagccagctatggcgaagcactgattcaatctcttatggaagtggtatcagtgctcctacacattttgtctaattctagtatcggttatgttagtagtgagggtctgggcaattctttaagcgtcgtccaacaagcaattggacctctcgctggaggtacgtcttc

SEQ ID NO: 574 - DNA, 443 bp, synthetic construct
  misc_feature 1..443: note = Description of Artificial Sequence: Synthetic polynucleotide
  source 1..443: mol_type = other DNA
gaagacttagcaggttcgtcatttgcgaatgcagcttccgctgcacccgctgtttcagttgatggtcctgtagttgtctctggtcaagtcctaccggcttctttgttgactgctcttgcaccagttgtgtccagttctggcctagcatcctcaacggcctctgctagagtttccagcttggcacaaagcatagctagtgccattagcagtagtggtggaacactatctgtaccaacctttctcaatttgctctcttcggctggtgcccaagtcactaccagcagtactttgaattcttcacaagttacgtctcaggtattattagagggtatcgccgcccttttgcaagtgatcaacggagcccaaatccgaagcgttaatttggcaaacgccccaaacgttcagcaagcacttgtatcagcattggcgggaggtacgtcttc

SEQ ID NO: 575 - DNA, 614 bp, synthetic construct
  misc_feature 1..614: note = Description of Artificial Sequence: Synthetic polynucleotide
  source 1..614: mol_type = other DNA
gaagacttagcaggtcaaggtaccagtttcgctagctccgctaccgccggaatacgaaatatcttcggcaaccctaacactgcaaataattttgtcgactgtttgaagggaggaattcaagcttcacctgcgtttccacgtcaagagcaagccgacattcaatcgattgcctctagcattctgtccgctggtaacaccgcaacgaagtctaaagccatcgagcaagctttgtctactgcccttgcctcgtctctcgcagaaatcgttatcaccgaatccggcggtcaggattactctaagcagattaccgatcttaacggaattttgagtaactgtttcatacaaaccacaggagttgagaacaagaggttcgtgaattcgattcagaaccttatccggttgttggctgaatccgcggtttcagaaactactaacagtatccaaatcggtccatacgcttctacctcgtccaactcattttcagattcgtctgccaatgacgcctctggagcttatgccttctcacaaagttcagcctccacgttagcaagctctagcgcttttagttcagctttttcaagcgcttcctcggcctccgccgtaggtacgtcttc

SEQ ID NO: 576 - DNA, 614 bp, synthetic construct
  misc_feature 1..614: note = Description of Artificial Sequence: Synthetic polynucleotide
  source 1..614: mol_type = other DNA
gaagacttagcaggtcaatccgtagctgtcacagctgttccgtcagttttctcttccccgaatttggccagtggctttttgcaatgcctgacctttggtattggaaattctcccgcattcccaacccaggagcaacaagatttggacgctatcgctcaagttatactgaatgctgttagcaccaatactggagctactgcctccgcacgagctcaggctttgtcgacagccttagcctcatctttaacagacttgctgatcgcagaatctgccgagtcaaattacaacaatcaattgtctgaacttaccggaatcctatcaaactgttttatccagacgacaggttccgataaccctgcttttgtgtctagaattcaatctctgatctctgttctgtctcaaaacaccgatgtaaacatcattagcacagcaggtctgccaactgctattagtggagcaggtggtttcggatttgccaagactgcatctagctcagcgagccaagcttcagcgtcgagctttgcacaggcctcgtccgctagtttggcagcttcttcgtcgttctcaagtgcctttagttctgcgaatactttatctgcattaggtacgtcttc

SEQ ID NO: 577 - DNA, 632 bp, synthetic construct
  misc_feature 1..632: note = Description of Artificial Sequence: Synthetic polynucleotide
  source 1..632: mol_type = other DNA
gaagacttagcaggtcaaagtgtagccgtcacagccgtcccttcggttttctctagtccaaacctggcttcaggattcttgcaatgcttgaccttcggtataggaaatagccctgcatttccaactcaggaacaacaagacttagacgcaatcgcccaagttattttgaatgccgtctccagtaacaccggagcaactgctagtgcacgagcgcaagccttgagtacagcattggcctcctctttgaccgacctgcttatcgccgagtctgctgaatcaaactactcaaaccagttgtctgaattgacgggtattttgtctgattgttttatccagactactggtagtgacaaccctgcctttgtgtccagaatacaatccttgatctcagtattgtcccagaacgcagatactaatatcatctcctctgcaggtattccatcagtgagtggccgacggggagccggtggtctaggcttcgataataccgccagacaaagcgcatcatccgccgcttcacaagcttctgctagttcatttgcacaggcttctagcgcatcgttggctgcgtcctcagccttctcatcagctttcagttcagctaattccctgagtgccctaggtacgtcttc

SEQ ID NO: 578 - DNA, 443 bp, synthetic construct
  misc_feature 1..443: note = Description of Artificial Sequence: Synthetic polynucleotide
  source 1..443: mol_type = other DNA
gaagacttagcaggtcaacaatcaaagtttggacaaaggtttccatcagtttcgcacatatggaacaggaagttttctcgtatctcgtactctagaacaactcgtcttggttgtcactgtccaggtgatactcaatgtaggttcaaacaacactggcgtcactcaatcggtcagtcatcaggattcaagtactcagcctgcatcttttcttctgctaattcgcttagcgccctgggtaacgtcgcctatcaactgggttttaacgtagctaatactttgggaataggtaacgccccaggtctgggagctgcattgagtcaagctgttagtagcgttggtgttggcgcttcgagctcgacgtacgcaaatgttgtaagtaacgcagtaggacaatttttggcaggtcaaggagtattgaatgccgccaacgcaggtacgtcttc

SEQ ID NO: 579 - DNA, 779 bp, synthetic construct
  misc_feature 1..779: note = Description of Artificial Sequence: Synthetic polynucleotide
  source 1..779: mol_type = other DNA
gaagacttagcaggtctgccagcaaactctctgtctggagtgtcggccagtgttaacatattcaactcccctaacgccgcaacctcgttcttaaattgcctgcgctcaaacatagaatcaagtcctgcgtttccttttcaagagcaagccgacctggatagcattgctgaggttattctatctgatgtgtcctctgtcaacaccgcctcctctgctacttccttggctctgagcaccgctttggctagctcacttgctgaactcctagttacggagtcagctgaagaggacatcgacaaccaggttgtggccttgagtactatcttgtcccagtgtttcgttgaaactacgggatccccaaaccctgctttcgttgcttctgttaagtcactcctgggtgttcttagtcaatctgctagcaattacgagtttgtggaaactgctgatgaatctattgcagcaaacgttccaggcataactacaacaggtaacttcacgccgttaaacgcaattgagcaaaattttgtatcaagcctggcgtcgtctccaagtcttgcgcgtacattctactccgtaagcaacgcagatcaggctgcaaacattgcctataacctaggtcttaacattgctccatctttaggtatcccaaattccgaggcacttgcttcaagcttgcgtcaagctgtggcaagcgcaggtgaaggtgttaattcatcaacttacgctaatcttgtatctaacacattgggtcagttcctgagctcgcaaggtacgtcttc

SEQ ID NO: 580 - DNA, 743 bp, synthetic construct
  misc_feature 1..743: note = Description of Artificial Sequence: Synthetic polynucleotide
  source 1..743: mol_type = other DNA
gaagacttagcaggtcaggctatatcagtcgctacgccagttccctcggttttctcttcgccatctttggcttcaggatttcttggatgtttgactaccggtattggtctttcacctgcattcccttttcaagagcaacaagacttagatgatcttgctaaagtaattctttccgctgtaacttcaaatactgatacatccaagtctgctcgcgcccaggctctttcaaccgctctggcatccagtttggccgatctgctgattagtgagagtagtggatcttcttaccagacacaaatctctgcccttacaaatattctgtccgactgtttcgtgacgactacaggatccaataatcctgctttcgtctctagggttcaaactcttattggtgttttgtcccaatcttcaagcaacgccatatcaggcgctactggtggaagtgctttcgcccaatcccaagctttccaacaatctgctagccaaaacacaggcctttccgcatctcgagccggatctacgtctagcagtaccacaacaacgaccagtgccgcagcttctcaggctgcatcccagagtgcatcgagttcaagctcgtatgcctttgctcaagcagcatcgtccagtctggcaacaagctcagcaatctccagagcatttgcatcggtgagttccgcctcggccgcctctagtttggcgtatacaattggattgtctgccgcaagaagtttaggtacgtcttc

SEQ ID NO: 581 - DNA, 545 bp, synthetic construct
  misc_feature 1..545: note = Description of Artificial Sequence: Synthetic polynucleotide
  source 1..545: mol_type = other DNA
gaagacttagcaggtcagccaatctggaccaaccctaatgctgccatgacaatgaccaacaatcttgttcagtgtgcaagtagatcaggagttctgacagcagatcaaatggatgacatgggaatgatggccgactcggttaattcccaaatgcagaaaatgggtccaaaccctcctcaacacagactcagggccatgaacactgcaatggctgcagaagtcgcagaagtggttgcgacctctcctccacagtcttactctgctgtgttgaacacaattggtgcttgcttacgcgagtcgatgatgcaagctactggttcggtggacaacgccttcacaaatgaggtgatgcagctggtgaaaatgctatccgctgattctgctaacgaagtttcgacagcttctgcatctggagcctcgtatgctacttctacatcgtctgctgtatcatcttcccaggccacaggttatagtaccgctgccggatatggcaatgcggctggtgctggtgcaggtgcagcagctgcggtgtcaggtacgtcttc

SEQ ID NO: 582 - DNA, 515 bp, synthetic construct
  misc_feature 1..515: note = Description of Artificial Sequence: Synthetic polynucleotide
  source 1..515: mol_type = other DNA
gaagacttagcaggtcatatctggggaaccccaggagccggaaagtctgttactggttcgatcgtccagtgcgctggacaatctggagtcttttctggtgatcagatgcaagatcttggagatatggctgacgctgtcaatagacagttagatcgtttgggtccaaacgctccagatcaccgactcaaaggagtgactactatgatggctgctggtattgcggacgccgctgttaactctccgggtcaatcgctagacgtgatgatcaatacaatctctggctgcatgacacaagccatgtctcaagctgttggttatgtcgaccagaccctgattagggaagtcgcagaaatggtcaacatgcttgcaaacgaaaacgcaaacgcggtatctacctctggaggtgttagtggtggatcgtacgaggttagtcagtcctcatctgcttctagtgccaccgctcaggcgggttattcctcttctgtacaatttggaacctcatcaggtacgtcttc

SEQ ID NO: 583 - DNA, 716 bp, synthetic construct
  misc_feature 1..716: note = Description of Artificial Sequence: Synthetic polynucleotide
  source 1..716: mol_type = other DNA
gaagacttagcaggtgccttgggtcagggagcttcagtatggagctctcctcaaatggccgaaaattttatgaatggtttttcaatggccctttcccaggcgggtgccttttccggtcaagaaatgaaagactttgatgatgtaagggacattatgaatagcgcaatggacaagatgatcagatctggcaaatctggtaggggcgctatgagggcaatgaacgctgctttcggatccgctatagccgaaatagtggcagcgaatggtggtaaagagtatcaaataggagctgttttggacgctgtcaccaatactctgctacagttgacaggaaacgctgataatggattccttaatgaaatttccagattaatcactctattttccagcgtagaagctaacgatgtttctgctagcgctggtgcagacgcttctggctctagtggacctgttggcggatattcatctggcgcaggcgcagctgtcggtcaaggcactgcccaggctgttggctacggaggcggtgctcaaggagttgcctcatcagctgccgctggagccactaactacgctcagggagtttctactggatcaacacagaacgttgccacctccacagtcactactaccactaatgtagccggatccaccgcaactggttacaacaccggttatggtatcggtgcagcagccggtgctgcagcaggtacgtcttc

SEQ ID NO: 584 - DNA, 818 bp, synthetic construct
  misc_feature 1..818: note = Description of Artificial Sequence: Synthetic polynucleotide
  source 1..818: mol_type = other DNA
gaagacttagcaggtagaggaatcattgctaattcgcctttctctaaccctaatacagctgaagcttttgccagatcattcgtgtccaacatcgtttcttcaggtgagttcggtgctcagggtgcagaggacttcgacgatataattcaatctttaattcaagctcaatcgatgggcaagggacgtcacgatacaaaggcgaaggccaaagctatgcaagttgcccttgcaagctctatcgctgaattggttattgctgaatctagcggtggtgacgttcaacgcaagaccaacgtcatttccaacgcattacgaaatgccctgatgtcaaccacaggtagcccaaacgaggaatttgtgcatgaagtccaggaccttattcagatgttatcacaagaacagataaatgaagttgacactagcggccctggtcaatactaccgttcttcatcatcaggaggaggtggtggcggacaaggtggaccagttgttaccgagacacttaccgttactgttggcggatctggaggaggtcaaccaagtggtgcgggaccaagcggtaccggtggctatgcccctacaggttacgctccatctggatcaggcgctggaggtgtaagaccatccgcctcaggtccttccggttcaggtccgtccggtggttctaggccttcaagctctggtcctagcggtacacgtccatctcctaatggtgcctctggttcaagtcctggaggaatcgcaccaggtggatcgaacagcggaggtgcgggagtatctggagctaccggaggaccggcttcctcaggtacgtcttc

SEQ ID NO: 585 - DNA, 740 bp, synthetic construct
  misc_feature 1..740: note = Description of Artificial Sequence: Synthetic polynucleotide
  source 1..740: mol_type = other DNA
gaagacttagcaggtcgtggtatcatcgtaaattcccctttttcgaatccaaacactgcggaggcatttgccagatcattcgtttcgaacgttgtttcctctggagagttcggtgcccaaggagctgaagattttgatgatattattcaatctttaattcaagcccagtccatgggaaaaggcagacatgatactaaagccaaagctaaagctatgcaagttgcattggcctcgtccatagctgagttggttatcgctgaatcatctggaggagacgttcaaagaaaaacaaatgtgatttcaaacgctttgagaaacgccctaatgtcgacgactggctctcctaacgaagagttcgtccatgaagttcaagatctaatacaaatgctgagtcaagaacaaatcaacgaggtggatacctctggtccaggtcaatattatcgtagctcttcgtctggtggaggtggtggtggaggaggtggacctgtcataacagaaaccctcacagttaccgtcggtggaagtggagcaggtcagccatcaggagccggtccatcgggaactggtggttatgcgccaacgggttacgctccaagcggctctggtcctggaggagtcagaccatctgctagcggaccttccggttctggtccttctggatcccgtccctcgtcatctggatcttcaggaactcgtcctagcgcaaatgccgctggtggttcgagcccaggtacgtcttc

SEQ ID NO: 586 - DNA, 746 bp, synthetic construct
  misc_feature 1..746: note = Description of Artificial Sequence: Synthetic polynucleotide
  source 1..746: mol_type = other DNA
gaagacttagcaggtgttcaagtagagggtcgtaaaggtcatcatcatagctccggttcgtctaaaagcccttgggcaaacccagctaaggcaaacgccttcatgaagtgcctgatacaaaaaatttctacttctcctgttttcccacagcaggaaaaggaggacatggaagagatcgtcgagacaatgatgtcggccttctcaagtatgtctactagtggtggttcgaatgctgccaagctgcaagcaatgaacatggccttcgcttcgtctatggccgaattagtgatcgccgaggacgctgacaacccagacagtatttctattaaaactgaagccttggccaaatccttacagcaatgtttcaaatccactttaggttctgtgaacagacatttcatagctgagattaaagacctcatcggaatgttcgcaagagaggctgcggccatggaggaagcgggcgacgaagaggaagagacatacccatcagcctttgaaatccctgaccaatccatctccgttcctagcgcagattttatttcaggaatggataccttcattggattcggaggaacctctgcttccggtgacgtgtcagctaagttatctaaatctctgctctcttctttggcctcgtctggagtttttagagccgcatttaactcaagggtcagtactcctgttgcagtacagctcactgatgctttggttcagaagatagcgagcaacttaggtacgtcttc

SEQ ID NO: 587 - DNA, 824 bp, synthetic construct
  misc_feature 1..824: note = Description of Artificial Sequence: Synthetic polynucleotide
  source 1..824: mol_type = other DNA
gaagacttagcaggtttggattacgccacggcaagtaaattacgtaaggcgtcgcaggctgtttccaaggttagaatgggttctgacaccaacgcttatgctctcgcgatttcctctgcattggctgaggttttgtcaagtagtggaaaagtcgctgacgcaaacataaatcagatagcacctcagttagcttcaggaattgtgctaggtgtctccacaactgctccacagtttggagttgatttatcttccatcaacgttaacctggatatttcgaacgttgcaagaaatatgcaagcctccatccaaggcggcccggctccaattaccgctgagggtcctgattttggagctggttaccctggtggtgcaccaactgacctttctggattagacatgggtgccccatctgacggctctagaggaggtgacgcaaccgcgaaattgcttcaagctcttgttccagctttactaaaatccgacgtattcagagcgatctataaaagaggaacgcgtaaacaggtggtccaatacgttacaaatagcgctttgcaacaggcagcaagttctttaggattggacgctagcacaatttcccagttgcagaccaaggccacgcaagcactatcctcggtgtctgccgatagtgactcaactgcttacgcaaaagcttttggtttggctattgcccaagtgctaggcactagcggtcaagtcaatgatgctaatgtcaaccaaatcggcgctaagttagcaactggaatcttgagaggaagttccgctgtcgccccacgtttgggaattgatttgtcaggtacgtcttc

SEQ ID NO: 588 - DNA, 458 bp, synthetic construct
  misc_feature 1..458: note = Description of Artificial Sequence: Synthetic polynucleotide
  source 1..458: mol_type = other DNA
gaagacttagcaggtcaatctaatccgtggacagacacggctacagccgaaagtttcatatcctctgttatgtcctcggttgctaaccaaggttgcttgagctatgaccaaatcgatgatatgcaagccgtgggtgacactatgttagctacaatggacaaccttgtccgatcaggtaagtcatctagccacatgttgaaggccatgaacatggccatgggtacatctatcgctgaaattgttgctgatggcggtggaaatttaggtagcaaagtgtcttgcatctctaacgctctgtctagtgcgtttctacaaacaacaggatccgtcaatacacagtttgtgaacgagatcgtcagcttaatctcgatgttcgcacaagcagacacaaacgaagtcggcgttggatcgggctcaggagcaggagctggaagtggtgctggtgcaggtacgtcttc

SEQ ID NO: 589 - DNA, 530 bp, synthetic construct
  misc_feature 1..530: note = Description of Artificial Sequence: Synthetic polynucleotide
  source 1..530: mol_type = other DNA
gaagacttagcaggtgtgggacaagccgcgaccccttgggaaaactcgcaacttgcagaggattttatcaattcttttctcaggttcattgctcagtctggtgcattctccccaaaccaacttgacgatatgtcgtccattggcgatacacttaagacagctatcgagaaaatggcacagtctagaaagtctagtaagagtaaactccaggctctgaacatggctttcgcatcctctatggctgaaattgccgtggcggaacaaggcggactatcactggaagctaagaccaacgctatcgccaatgctttggctagtgcttttctggaaacaaccggattcgttaatcaacagtttgtttccgaaataaagtctttgatctacatgatcgcacaagcttcatcaaacgagatttccggaagcgccgcagccgcaggaggtggcagcggcggtggtggaggatcgggacagggaggctatggtcaaggtgccagtgcgtccgcctcagctgctgcagcaggtacgtcttc

SEQ ID NO: 590 - DNA, 779 bp, synthetic construct
  misc_feature 1..779: note = Description of Artificial Sequence: Synthetic polynucleotide
  source 1..779: mol_type = other DNA
gaagacttagcaggtgtttttagcgctggtcaaggtgctactccttgggagaattctcagttggctgagtcttttattagtcgttttttaaggtttattggtcaatccggtgcattctctcctaatcaattggacgatatgtcatcaatcggagacacactgaaaactgccattgaaaaaatggctcaatccagaaaatcttctaagtcaaaattacaggcccttaacatggcatttgcctcctcaatggccgagattgccgttgccgaacaaggaggtttgtccttggaggcaaaaaccaatgctatcgcttcagctctgagtgctgctttcttggaaactaccggttacgtaaaccagcagttcgtgaacgaaatcaaaactctaatcttcatgattgcccaagcttcttctaatgaaatcagcggtagtgctgctgcggcaggaggttcttctggtggaggtggtggcagtggtcaaggaggttatggccaaggtgcttacgctagtgcctctgctgctgctgcgtacggttcagcaccacaaggtactggaggtcctgctagccaaggtccttcccaacagggtccagtatcacaaccttcgtatggtcccagtgccacggttgccgtgactgccgtcggcggtcgtccgcaaggccctagtgccccaagacaacagggacctagtcaacaaggaccaggacagcaaggacctggaggtagaggtccatatggtccttccgccgcagcagctgcagccgctgcaggtacgtcttc

SEQ ID NO: 591 - DNA, 659 bp, synthetic construct
  misc_feature 1..659: note = Description of Artificial Sequence: Synthetic polynucleotide
  source 1..659: mol_type = other DNA
gaagacttagcaggtagaaccaaagttactaacgttccttggactgatgaggctaaaggaaaaaagttcctctccacttttcttgactacgcgttagatcatggactcttccctcaacaagagcgtgatgatctagaagccattagtcaaaacttaattccggtttttcgaaagacaatggattctggtggaaacgccgcggctaagatgaaggccttgaatatggcttttgcttcgtctattgcagagatagcagtgcaagaaggtggtgcgggatcaattgaagagaaaactcaggctgtttctgaggctttagctcatgcgttccttcagacaacaggttctgttaacatccaattcattaaagagattagagcactcattacgctgtttgccaaagaaggccaggataacgaaacagaaaacgaaattccaacccagcaagcataccctgagctgcaacctagaggtggcggtttgcaaggccagccaggtcaatacgaatccgttagagcaaactacgccggttccggtggtgctagccgtggtcaagctgcaaaggaagattcaggcgctgctgccgcatcttcttccagcacatccacatcaactactacaactagttcagcagcggctgccgccgctgcaggtacgtcttc

SEQ ID NO: 592 - DNA, 896 bp, synthetic construct
  misc_feature 1..896: note = Description of Artificial Sequence: Synthetic polynucleotide
  source 1..896: mol_type = other DNA
gaagacttagcaggtgcttcaagttatgcctctgcaaatactacgccatggcgagacgctgctacagctcaagctttcataggcaattttatgcaagctatctgctatgatcctgttattaatcctcaacagtgcgacgatatgaattctatggcaagcacaatcctggctggtgttcagaacatggccagagatggtaaaatatctaaagcgaagctgcaagctatgaatatgggattcgcatcggccattgctgagattgcacttgtcgaaggaggtgccccagccgaaaacgctgtggttaatgctatgcaatccgctatctggcagagcactggttcgcccaaccgttcctttattaatgaaatgaaagcactcatgaagatgcttgcccaacaatccaatttcgtggccgccgctgcttccactgcagcgtccgccagtagtcaggctaccgccccagcttatggaggaggtagcggtagtgccgttgcatctgcctcttcgcaaggaacagctccagcctatggtggtggctcgggttctgctggtggtcagggtcaaggtcagggttcttccggtcaacaaggccaaacacaaggaacttatcagtacactgttagcatgagcactgctacttctacttatggacagcaatccgccggacaacaaggaggccaaggtggagcccttcaaggtggtcgacaacagggtggccaaggtccaaacggaccaggagcttctgccgccgcatccgcttccgctggagcaccagctgctgctgctcctggaggatatggtggtccaggtcagcaaggacctggtcaaggacagaaaggaccagcgacttcagcagcagctgccgccgcgagcgcaactgcagcaggtacgtcttc

SEQ ID NO: 593 - DNA, 767 bp, synthetic construct
  misc_feature 1..767: note = Description of Artificial Sequence: Synthetic polynucleotide
  source 1..767: mol_type = other DNA
gaagacttagcaggtcaccagggacctcatcgaaagacgccctgggaaacaccagaaatggctgaaaacttcatgaataacgtaagagaaaaccttgaagcatctagaatcttccctgacgagttgatgaaagacatggaggctataaccaacaccatgattgctgctgttgacggtctggaggctcagcatcgatctagctatgcatcccttcaggctatgaacacagctttcgccagtagcatggctcaattatttgcaacagagcaagattatgtggataccgaagtcattgccggtgctattggtaaagcctaccagcaaattactggttacgagaatccgcacttagctagtgaggttactcgactgattcaattatttcgcgaggaggatgatttggagaatgaagtagaaatatccttcgccgatactgacaatgccattgctagagcggctgctggtgctgccgctggatcagctgctgcttcttcctcagccgatgcttcagcgacagctgaaggtgcatcaggtgatagtggtttcttattttccacaggaacctttggaagaggtggtgctggtgcaggcgcaggagctgctgctgcatccgccgccgcagcttctgccgcagcagcaggtgccgagggcgacaggggtttgtttttcagtacaggtgattttggtcgtggaggagccggagctggtgccggtgctgctgcagcctcagccgctgccgcttcggctgccgcagcaggtacgtcttc

SEQ ID NO: 594 - DNA, 452 bp, synthetic construct
  misc_feature 1..452: note = Description of Artificial Sequence: Synthetic polynucleotide
  source 1..452: mol_type = other DNA
gaagacttagcaggtaacacaccattcgctaataaaattatggccgaagattttatgaataaatttacaaaccaactggccaatagcccatatttctcctcacagcaaaaagaagatatgagttctatcaaggacgagcttatatctgtaatagagagtatggattcggctcacaaatcttcagcggcaaaactacaggctatgaacatggccttcgcgagtgctattgcagatatcgctgctactgaagcttatggtgctgacatctctctcgagacgtccgcaatcgctaacgcactttctgaagccttcctgcagaccaccggtgtggtcaataagaggttcatcagtgagatccaagaattgatttatatgttcgctcaggacgccagcgtccaatctaatgagattgcctcctcctcgtctgctgctgcagctgcaggtacgtcttc

SEQ ID NO: 595 - DNA, 557 bp, synthetic construct
  misc_feature 1..557: note = Description of Artificial Sequence: Synthetic polynucleotide
  source 1..557: mol_type = other DNA
gaagacttagcaggtagtagctctcttgcttcacataccaccccttggaccaatcctggactagcagaaaactttatgaactcttttatgcaaggtttgtcctcgatgccaggatttactgcaagtcaactggatgatatgagtaccattgctcaatctatggtacaatcaatccaatcgctcgcagcacaaggaaggacttctccaaataagttacaagcactaaatatggcttttgcaagttctatggccgaaatcgcagctagcgaagaaggtggaggcagcctgtctactaagacctcaagtattgcttctgctatgagcaatgcttttctgcaaaccacaggtgttgtcaaccaaccattcattaacgaaatcacgcagcttgtgtccatgttcgcacaagctggtatgaatgacgtaagtgcttccgcttcggcaggtgcctctgccgctgcttcggccggtgcacctggatactctccggctccgtcttactcctctggtggatacgcaagctcagcagcttccgccgccgcagctgcaggtacgtcttc

SEQ ID NO: 596 - DNA, 494 bp, synthetic construct
  misc_feature 1..494: note = Description of Artificial Sequence: Synthetic polynucleotide
  source 1..494: mol_type = other DNA
gaagacttagcaggttttgttgttcaaggtcgccaacataacgccgctaattccccatggtccaacgctaagaccgccgagatttttatttctaaatttatcagcgcgatcctggactccaatgcattcacacgtgaacaaaaggaagatatgatgtctataggtgaaaccatcatcccagctatggagaagatgtctggtagttcgaagtccatacatgctaagctaaccgctctgaacatggctttcgcctcttctgtcgctgaaattgctgtggttgaggagggtggatccgacattaacgagaaaacatacgccatcgtggctgctctcaaccaagcctttctggatacaacgggaaaagttaataaacaattcattgcagagatcagggatttggtcaaaatgtttgcatcagctaacgaagaaaacgaaataggtgcggcgctatcagctgagatttacacggaacaaactggctcaggtacgtcttc

SEQ ID NO: 597 - DNA, 671 bp, synthetic construct
  misc_feature 1..671: note = Description of Artificial Sequence: Synthetic polynucleotide
  source 1..671: mol_type = other DNA
gaagacttagcaggtagagcatacggagcaggagctggcgctggtgctgaagagggttacggtgctggtcaaggtatagccaacgcagttggaagaagaagggacagaactggtagaggtgtctttactgttagcactgtttcctccaatgtagttagtcagtccgaaggtctagttgaggacacgggcccaagtggagagggagaaagcgctgtttcttccgctgcatccgccgcaagtgctgctcaaacaggtccagaaagaacaggaagtgaaggtgcttcgacgagaggaggtgctggagcaggaagaggcttcggtgccggcgccggtgcaggagctgagtcaggcaaaggaggatacggttccggttctggagctggtgctggcgctggtgccggtgcttcaggcgagggaggcttcggtgaaggtcagggatacggtgctggtgctggtgcgggcgcttcggctggtgctggcgttggaagtggagcaggcgctggagccggatacggtgccggagcaggcgccggtgccggttttggcgtcggagccggagcaggtgccggagctggcgcaggatttggttccggtgcaggtgccggatctggtgcaggcgctggatatggtgccggaagagccggtggtcgtggacgtggaggtacgtcttc

SEQ ID NO: 598 - DNA, 557 bp, synthetic construct
  misc_feature 1..557: note = Description of Artificial Sequence: Synthetic polynucleotide
  source 1..557: mol_type = other DNA
gaagacttagcaggtcaaaatactccatggtcatctactgagctggctgatgcttttatcaacgcgtttatgaatgaagccggtcgaactggtgcttttactgctgatcaactagacgacatgtctactattggagatacgataaagacagccatggataagatggccagatccaacaagagcagtaagggtaaattacaagcgctgaatatggctttcgcatcatctatggctgaaattgccgctgtggaacagggaggcctctcagtggatgccaaaactaacgccattgctgactccctcaatagcgctttttaccaaactacaggagctgctaaccctcagtttgtcaatgaaatcagatctcttataaatatgttcgctcaatcgtctgccaacgaggtttcttacggcggaggatacggcggtcaaagtgcaggcgctgccgcaagtgcagcagcagctggtggcggtggccagggtggctacggcaatctgggcggacaaggtgctggagctgcagctgcggcagccgcttcagcagcaggtacgtcttc

SEQ ID NO: 599 - DNA, 557 bp, synthetic construct
  misc_feature 1..557: note = Description of Artificial Sequence: Synthetic polynucleotide
  source 1..557: mol_type = other DNA
gaagacttagcaggtcaaaacacgccttggtcctccaccgagcttgctgatgcctttattaacgctttcttaaacgaggctggacggactggtgcttttaccgccgatcaattagacgacatgtctacaatcggtgatactttgaaaacagccatggataagatggctaggtcaaacaaatcttctcaatcgaaattgcaagctctgaacatggctttcgcatctagtatggcagagattgctgctgtagaacaaggtggcttgagtgtggctgaaaaaactaacgccattgctgattcacttaatagtgcattttatcagacgaccggtgctgtaaatgtacaatttgtaaacgaaataagatccctcatttccatgtttgctcaagcttcggcaaatgaagtctcctatggaggcggatatggcggtggccaaggtggtcaaagtgctggtgctgcagcagctgcagcttccgcaggtgccggacagggcggatacggtggactaggtggacaaggagcaggttccgcagccgctgctgccgcaggtacgtcttc

SEQ ID NO: 600 - DNA, 458 bp, synthetic construct
  misc_feature 1..458: note = Description of Artificial Sequence: Synthetic polynucleotide
  source 1..458: mol_type = other DNA
gaagacttagcaggtcaggccagatcaccttggtcagatactgcgaccgctgatgcttttattcaaaactttctggctgccgtctccggatccggtgctttcaccagcgatcaattggacgatatgtctactataggtgacaccattatgtctgctatggataagatggcaagatcgaacaagagttcacagcataaactgcaggccttgaacatggcattcgctagttctatggctgagatagccgcagttgagcagggtggcatgtccatggcagtcaagaccaatgcaattgtcgatggactaaactcggctttttatatgactactggtgccgccaaccctcaatttgtcaacgagatgcgatcgctgatttctatgatttcagctgcatcagctaacgaagtgtcatatggaggaggagcatctgccgctgctgccgcagcaggtacgtcttc

SEQ ID NO: 601 - DNA, 674 bp, synthetic construct
  misc_feature 1..674: note = Description of Artificial Sequence: Synthetic polynucleotide
  source 1..674: mol_type = other DNA
gaagacttagcaggtattttcattgccggtcaagctaatactccatggtctgacactgctaccgccgatgcattcatccaaaatttcttgggtgcagtctcgggcagtggtgcttttactccagatcaactcgacgacatgagtaccgttggagatactatcatgtctgctatggataaaatggcacgcagtaacaaaagtagtaaatcaaagctccaagcacttaacatggcatttgccagttccatggctgagatcgcagccgtggagcaaggaggccaatccatggacgttaaaacaaatgctattgccaatgcacttgattccgcattttatatgacaactggtagtaccaatcaacagttcgttaatgagatgcgatcattgatcaatatgctgtcagccgccgctgttaatgaagtttcctacggtggaggagcatcagcggctgcagccaccgctggaagctacggacagggtcctagcggttacgctcaaggttcatccgctgcaagtgctgcagctccgtcaggttatgtcccctcccaaacaggacaatctggtctgggtgccgctgctgctgcagcagctgtagccccttccggatatggtccaagtcagcaaggtccatcaggtccgggtgcagctacagccgctgccgcaggtacgtcttc

SEQ ID NO: 602 - DNA, 461 bp, synthetic construct
  misc_feature 1..461: note = Description of Artificial Sequence: Synthetic polynucleotide
  source 1..461: mol_type = other DNA
gaagacttagcaggtcagaatgttgctgattctccttggtctagcaatgagaaggctgattttttcattcgttctttcaacgaagtcatatccaggtcctcggcatttacttctcaacagatcgatgatatgagtagtattggcgaaacattaatcagctccatcgataacatggccaagaatggtagatccagcactaagaagctacaagccttgaatatggcgttcgcttcatcaatggcagagattgcaatcgcagaacaaggcggtcagagtattgatgttaaaacaaatgcaattattgacgcactaaacgaagcatttattcgtacttcgggttctgtcaacaacgaattcatctcggaaattcggcagctaattcttatgttcagtcaagtttcgatgaatgattccgcttccggtagcaccgctgccgcaaacgcaggcgcaggtacgtcttc

SEQ ID NO: 603 - DNA, 563 bp, synthetic construct
  misc_feature 1..563: note = Description of Artificial Sequence: Synthetic polynucleotide
  source 1..563: mol_type = other DNA
gaagacttagcaggtgctaggggaattcacgtttcttcttataccccattcgcagacccatacacagctgagaactttgctcgcgctttcgttaataacattgttaactcaggtgagtttggtgctcaagacgcagccgactttgacgatattacgcagtcactcttgcaagctcaaaatttacacaaacgtcatgacagtaatgctaaggcaaaagctatgcaaatggcctttgcttcctctattgctgaactagttatcgcggaatcggaaggagcaaacattcaaaggcgtacatccacagtatctaactgtatgcgtaacgcaatgcaatcaacgaccggtggtgtggacgaagagtttatgcgtgaaattgaggacttgattcatctgttctcacaagaaagttttaacgaagtcgaaaactacggtcctggtacatattaccagtcgtctactacaggcggagctcctgtggtgaccgagtctgtcactgttaccgtagcaggtggcggacgtggcgctccagttaatcaaggaggacaagccccaggtacgtcttc

SEQ ID NO: 604 - DNA, 542 bp, synthetic construct
  misc_feature 1..542: note = Description of Artificial Sequence: Synthetic polynucleotide
  source 1..542: mol_type = other DNA
gaagacttagcaggtggaggtccaactccctgggattcaccatcaatggccgagtcattcatgagtaacttcatgtctggaattgcttccagtggcgctttctctggcggacagatcggagatatgcaagatattacaggaaccatgcaggattctgtaaataagatggcctctactggaaggtcgtcaaaatctaaactccaggcaatgaatatggcattcgcatcgtctatggccgaaatcgcagctgcggaggcaggtggatcctctatggctgccaagactagtgctatcacaaatgccctaaggggtgctttcttgcaaacaacaggagtttctaatgagcagtttatcaacgaaattgctacgttgattaacctgatctctcaatccaacgtgaatacagtatcagcttcggcttccgcaggaggtggtggaggttacggcgcccctgcttatggtccttcatcttacggtccatcccaaggaccttcgtcagtgtcatccgttagcgtctcctcatcagctgcaggtacgtcttc

SEQ ID NO: 605 - DNA, 554 bp, synthetic construct
  misc_feature 1..554: note = Description of Artificial Sequence: Synthetic polynucleotide
  source 1..554: mol_type = other DNA
gaagacttagcaggtagaggaattcatgtttcaattctttcaaatccgaatactgctatgaccttcgctcgtactttcgtctctaacattgctggatgtggcgaatttggatcgcagggtaccgaggatttcgatgacattatgcaatctcttattcaagctcagtccatgggaaagggtagacatgacaccaatgctaaggctaaggccatgcaaatggccctagccagctctattgctgaattgattgtagaagagtccggtggagtaaatatgcaacaaaaaaccaacgccgccattaacgctctgcgtaacgctttgcgttctacaagtggtaaggtagatgagggatttgtgagtgagattgtggaactcgtgaatttgttttcacaagaacagtttaacgaggtcgataccggatcatcacgtcaatactaccaatcctcgaccggtggtggccagggaggagctccaaccgtaactgaaactgttactgtatctgtcggaggaggtggaggtggtgctgcccagtccagtggaccaggtacgtcttc

SEQ ID NO: 606 - DNA, 512 bp, synthetic construct
  misc_feature 1..512: note = Description of Artificial Sequence: Synthetic polynucleotide
  source 1..512: mol_type = other DNA
gaagacttagcaggttacccccaacagaactatcagcctggaattggcatagcccaagacgatccattacttgatgaaggaaccggtgagaatttcgcggatgttttcactcaaaccttggaaaactgtggtgcttttactcacgacgaggctcaggagtataaagaaattattcgtgtgctgacgaaagcattcggatcattcccggacctgcagaaggctccacctggtgttctgaaagctacagccgccggtttcgcttcagcggtggcggaacgaactgctgctgatgttgaccacggacagttgtttgcaaagacacgatgtgtaatccaggctttgagagaggcattcatcgttactacgggagttactaacccatattttatatccgaggtggaaagattgatcgaagttttctatattaccaagggtctacctcactctcctgtccagcaacctctagaagaaccacaaggtcaagtacaataccaacaacaaggtacgtcttc

SEQ ID NO: 607 - DNA, 563 bp, synthetic construct
  misc_feature 1..563: note = Description of Artificial Sequence: Synthetic polynucleotide
  source 1..563: mol_type = other DNA
gaagacttagcaggtgcatcacctactttttctcgaagtccttgggctaaccctgctaaggcttcttcacttatgaactgtctcatcactaaaatcgcatcatcaaacgttctacctcaacaggaaaaagaagatcttgagtcaatcatggataccttgatgtctgctataaagggtgcctccgcaaaaggaaagtcatctggtgctcaattgcaggccattaatatggcagtcgcttctagtttggctgagatcgtcgtcgctgaagatgtaggtaaccaagcttcgatggctgtcaaaactcaggccctgtcgggagccctagagcagtgtttccagaccgtgatgggaacggttgaccgaaagttcattaaggagattaatgacttgatcagtatgtttgctagacaagccgctacggaggctaatgaaattcaggaccagggcggtttttacgccgccggtagttcggactctactagcttccaggcaacgtctcgcactttacagggatcttcacaaacgacaggaggattcggaggagcatatccaggtacgtcttc

SEQ ID NO: 608 - DNA, 524 bp, synthetic construct
  misc_feature 1..524: note = Description of Artificial Sequence: Synthetic polynucleotide
  source 1..524: mol_type = other DNA
gaagacttagcaggtcagtccaaccctgttaacgatgatccgtatggctttaatgaaaccgagaagaagttttctgacgttttcgtggataatgtcattaattcagatgccttcactctaatgggtgaaaacgacattgaagaggtgacgaacattttgctgacgtccatacaactccttaagaagtctcaggatggagatgcgaatcaaaaaaagaccttgatggtagcttttgcgtctagtatggccgaacttattttggatagatgtgacactacattaggtatcgaacataagaccgagattataacaaatgccttgaagaatgcttacctacaaaccacaggaaagcccaataagcctctgatcaaggaggtcaggttccttgttgcactgtttttgacactggagtccccaggttttttagatcctttgtggaatccatacggaagaaatccagctttcggactgccaccatcctatggagttccactatacccagcgcccccacaaggtacgtcttc

SEQ ID NO: 609 - DNA, 470 bp, synthetic construct
  misc_feature 1..470: note = Description of Artificial Sequence: Synthetic polynucleotide
  source 1..470: mol_type = other DNA
gaagacttagcaggtcttggacagtccccgtggaaggacgcctcaatagctgagtcattcatgaataacttctctaacgcgcttgcccgctccggagctttttcgagtgaccagatggacgacatcatgtctatttgtgactcaattcagtctggaattgtcagaatggatcggtcaggtaaaacttctgctaataagttgcaagctatgaatatggcttttgcctccgctgtggcagaaatcgcaattgccgagggtggaggacaatctgctcaagtcaagacaaacgctgtcgcagacgctttagccagtgcttttctacaaacaaccggagtggtaaacacacagtttatcaacgaaataagaactttaatctctatgtttgctcaggctaacgttatcgattcctcttcgggtagtgtttccgcaagcgctggtggagctggtcaaggaggagcaggtacgtcttc

SEQ ID NO: 610 - DNA, 623 bp, synthetic construct
  misc_feature 1..623: note = Description of Artificial Sequence: Synthetic polynucleotide
  source 1..623: mol_type = other DNA
gaagacttagcaggtttcggccaggcagctaccccatgggagaacactgccttggcggaagcctttatcaataagtttttggaatcaattggacaaactggaaccttttcggctagccagcaggacgacatggcgacgattggagacactcttaagaccgccatggaaaaaatggctcaatctaggaaatcctcgaagtctaaattacaagctcttaatatggctttcgcttcatctatggctgaaattgcagtggctgaacagggaggtttgtcaattcaggcaaaaacggaagcaatagcttcagctctgtcgagcgcttttttgcaaacaacgggtgtgattaattaccaattcgttaacgagatcaaatcgttgatatacatgatcgcccaagctagcactaacgaggtcggttcttccgccgcgtcggctggaggtggatccggtggaggtagctacggacagggttcctacgtatctgcttctgctgcgggtacatacggttctgctcctcaacagggcggttacgcacctgcacagggtccttcccaacaaggacctgtgtcccaaggtccatatggtccgagtgcctctgttgccgccgcagcaggtacgtcttc

SEQ ID NO: 611 - DNA, 407 bp, synthetic construct
  misc_feature 1..407: note = Description of Artificial Sequence: Synthetic polynucleotide
  source 1..407: mol_type = other DNA
gaagacttagcaggtcaacaaatttggacaaatcaggctgctgtaatggcaatgaccaacaattttgttggatgtgctagccagtccggcatgctcagtgctgatcaaatggatgacatggctatgatggcagacaccattaacatgcaagcaacgaggatgggtcctaatgctcccagacacaaattgaaggcactcaactctgctatggccgcttctattgctgaagtcgctgctagttccccaccacaatcctattccgccgtgttgaatgctattggatcctgcctgagggactcaatgatgcaggcgactggtgcagttgatgaaattttcacaaccgaagtgatgaagatggtgaacctattcgctatggataacgctaactcggtatcaggtacgtcttc

SEQ ID NO: 612 - DNA, 545 bp, synthetic construct
  misc_feature 1..545: note = Description of Artificial Sequence: Synthetic polynucleotide
  source 1..545: mol_type = other DNA
gaagacttagcaggtcagaagatttggactaacccagatgccgcaatggccatgacgaacaatttagtccaatgcgctggtcgtagcggagcattgactgccgatcagatggacgacttgggtatggtttctgactctgtaaattcccaagtaaggaagatgggagctaatgctccacctcataaaattaaagccatgagtaccgctgttgccgctggtgttgcagaagtcgttgcttcttccccaccccaatcctattctgccgttttaaacactattggaggatgtttacgagaatccatgatgcaggttacgggttcagttgataacactttcactactgagatgatgcaaatggtcaacatgtttgctgccgataacgccaacgaagtgtcagctagtgcttccggcagtggagcctcctatgccactggtacctccagcgctgtgtcaacttcgcaggctacaggatattctacagctggtggatacggcacagcagccggcgccggagcaggagctgctgctgccgcaggtacgtcttc

SEQ ID NO: 613 - DNA, 566 bp, synthetic construct
  misc_feature 1..566: note = Description of Artificial Sequence: Synthetic polynucleotide
  source 1..566: mol_type = other DNA
gaagacttagcaggtgctgcatctagtagtagcactatcatcacaacaaaaagcgcttccgctagcgctgccgcagacgccagtgctgctgctactgcctccgctgccagcagatctagtgccaatgcagcagcatcagcgtttgctcagtctttttcctccattctgttagagagtggatacttctgtagtatctttggatcatccatttcatcttcttatgcagccgccattgcttctgcagcatcacgcgcagccgctgagtcaaatggctacacaactcacgcttatgcgtgtgcaaaagctgtagcttctgccgtagaacgtgttacttctggagccgatgcttatgcctatgcccaagcaatttccgatgctctatctcacgcgctcctctacactggcagactcaacactgctaatgctaactcattggcaagtgcgtttgcttacgctttcgctaatgccgctgcacaagcaagtgcatcatcagcttctgctggagccgcctctgctagtggtgcggccagtgcctcgggtgcaggatccgcttcaggtacgtcttc

SEQ ID NO: 614 - DNA, 566 bp, synthetic construct
  misc_feature 1..566: note = Description of Artificial Sequence: Synthetic polynucleotide
  source 1..566: mol_type = other DNA
gaagacttagcaggtgcagcttcaagttcatcgacaatcatcaccacaaaatccgccagtgccccagctgctgctgatgctagtgctgccgccacctcatctgcagcttctagatcctctgctaacgcagccgcatccgcatttgcgcaatcatttagtagcatcttgctcgaatcaggatattttggttctatttttggatctagtatatcttcaagctacgcagctgctatcgcttctgccgccagtcgtgctgctgcagaatccaatggatacacaacacacgcatacgcatgcgcaaaggctgtagcatcagctgttgaacgcgtgacttcaggtgcagacgcatatgcatatgcacaggctatttctgatgcgttgtcccatgcattgttgtacacgggtcgacttaataccgccaacgcaaactctctcgcctctgcgtttgcttatgcttttgcaaacgccgctgcgcaggccagtgcgagttcagcctccgctggagctgcatctgcctccggtgcagcatctgcttcaggagctggatccgcttcaggtacgtcttc

SEQ ID NO: 615 - DNA, 566 bp, synthetic construct
  misc_feature 1..566: note = Description of Artificial Sequence: Synthetic polynucleotide
  source 1..566: mol_type = other DNA
gaagacttagcaggtgcagcttcgtcctctagtaccattataactactaaaagtgctagtgcttccgcggcagctgatgcttctgctgcagctactgcatccgcggccagcagatcctctgcaaatgctgcagcaagtgcatttgctcaaagattctcctctattctgctggagtcgggatacttctgttctattttcggttcttccatttctagttcttatgcggctgccattgcttctgcagcgtcgagagctgcagctgaatccaatggatacactactcatgcttacgcatgtgcaaaggcagttgcaagtgccgtcgaaagagtcacctccggtgccgatgcctacgcttacgcacaagccatctctggtgcactctcacacgctttactttatacgggaagattgaatacggcaaacgctaactctttggcttcagcttttgcttacgctttcgctaacgctgcagctcaggccagtgctagttcggcttccgcaggtgcagcctcagcctcaggagctgctagcgcctctggagctggtagcgcttcaggtacgtcttc

SEQ ID NO: 616 - DNA, 566 bp, synthetic construct
  misc_feature 1..566: note = Description of Artificial Sequence: Synthetic polynucleotide
  source 1..566: mol_type = other DNA
gaagacttagcaggtgcagcttcatcatcttcaactatcattacaactaaatcggcttcagcctcggctgctgcagatgcgtcagctgcggcgactgcgtctgcagctagtaggtcctctgcgaacgcagccgcaagtgcctttgctcaatcgttctcatccatccttttggaatccggatacttctgctctattttcggatcgtcaatctcctcaagttacgctgcagctatcgcctccgcagccagtagggctgctgccgaaagtaatggttacacgacccacgcatatgcttgtgcaaaggcagttgcctccgctgttgaaagagttacatcgggagccgatgcatacgcctatgctcaggctatttccgatgcattatcccatgcactattgtatacaggtagattgaataccgcaaacgccaatagtttggcttcggcttttgcatacgctttcgcaaatgcagcagcccaagcttctgcttcatcagcttcagctggcgccgctagtgcctcaggagctgctagtgcttccggagcaggttccgcctcaggtacgtcttc

SEQ ID NO: 617 - DNA, 566 bp, synthetic construct
  misc_feature 1..566: note = Description of Artificial Sequence: Synthetic polynucleotide
  source 1..566: mol_type = other DNA
gaagacttagcaggtgctgcatcttccagttcgactataataaccaccaagtcagccagtgcatcagcagctgcagatgcttcagctgctgctaccgcctctgctgcatctcgatcctccgccaatgcagcggctagtgcctttgcgcaatctttctcttccatcttgctagagtctggttatttttgttcgatttttggatcatccatatcttcatcatatgcagccgcgatcgcgtctgctgcaagtagggctgccgcagaaagtaatggttacacgacccatgcatatgcctgtgcaaaagctgtagctagtgcagttgaaagagtaacctcaggcgctgacgcttacgcctatgcccaagctattagcggcgcacttagtcatgctctgttgtacactggtcggttaaatacagctaacgctaactctttagccagtgccttcgcatacgctttcgcaaacgctgccgcccaggcctcagcttcttctgcctccgcaggtgcagcatcagcttcaggagcagctagcgcctcaggtgcaggttcagcctcaggtacgtcttc

SEQ ID NO: 618 - DNA, 566 bp, synthetic construct
  misc_feature 1..566: note = Description of Artificial Sequence: Synthetic polynucleotide
  source 1..566: mol_type = other DNA
gaagacttagcaggtgcagcatcatctagttctactatcataactactaaatcggctagcgccagtgctgctgcagacgcatcagcagctgcaactagttcggccgcctccaggtctagcgccaatgcggccgcttctgcctttgctcaaagtttttcctctattttgctggaaagtggatatttcggttccattttcggttcttctatttccagcagttatgccgccgcaattgctagtgctgcctcgcgagcggctgcggagagtaatggatatactactcacgcctatgcctgtgccaaagcagtcgctagtgcagtagaaagagttacctcaggtgccgatgcatatgcctatgctcaggcaatttcgggagctctttcacatgccttgttgtacaccggtagattgaatacggctaatgctaactcattggcatcagacttcgcttacgcattcgcaaacgcagccgctcaagctaccgcctcttccgcctctgcaggagcagcttcggcctccggtgctgcttctgcatctggtgccgcatccgcatcaggtacgtcttc

SEQ ID NO: 619 - DNA, 566 bp, synthetic construct
  misc_feature 1..566: note = Description of Artificial Sequence: Synthetic polynucleotide
  source 1..566: mol_type = other DNA
gaagacttagcaggtgcagctagttcctcttcaactataattactactaaatcagcatctgcaagcgctgccgccgacgcatcggcggcagctacagcatcagccgcgtctagatccagtgcaaacgcggctgctagtgcctttgcacaaagctttagttccatattgttggagagcggttatttcggttctatttttggatcttccatttctagctcctatgcagccgcgattgcttcagctgcttctagagctgctgctgaatccaacggatacacaacacatgcttatgcttgtgcaaaggctgtcgcttctgccgtcgagagagtcaccagcggagccgatgcctatgcctacgctcaagcgatctccggtgccttgtcttatgcactcctttacacaggtagactgaatactgctaacgcaaactcattggctagtagctttgcttacgcttttgcaaacgctgcagctcaggcttctgctagcagtgcgtccgctggagcagcatccgcttctggtgcggcttctgcctccggagcagcttccgcttcaggtacgtcttc

SEQ ID NO: 620 - DNA, 530 bp, synthetic construct
  misc_feature 1..530: note = Description of Artificial Sequence: Synthetic polynucleotide
  source 1..530: mol_type = other DNA
gaagacttagcaggtgccgctgctacatcttcatcgaccagcggagcctcggcctctagtatttcgtccacaactgcctcaagttcttctacaggagcaagttcagctgccgctggagctagtcacggagcagcttcggcgggtggagcatttgattttacgagagctctattttctgaactgctagaatctaagatattttccgccaccacggcaaactttcatagttccacaacggcttctgaaactctttacgccaccattctgaagtgccttagggaattacacttcaggtacgacgaatgcttgcaaggtgcaactgaagtggtgagtgatttgtctgtagtatccgttggttctggagttcacaactacgctagagttattgcagctttctttgaacgcttctttcgaaagcacgacatcccattgtccgcaaactatgcttccagagttgcacagtatttaatttcagctatgggcagttcggtagcttccgcagacgcttcgtcgtcatcaggtacgtcttc

SEQ ID NO: 621 - DNA, 530 bp, synthetic construct
  misc_feature 1..530: note = Description of Artificial Sequence: Synthetic polynucleotide
  source 1..530: mol_type = other DNA
gaagacttagcaggtgcggctgccactagttcctctacttctggtgcatcagccagcagcatctcctcaacaactgcttcctctagtagtactggagctagttctgctgcggctggtgcctcgcacggtgccgcctcagctggtggagcgttcgatttcacacgcgcattgtttagcgaactgttggaaagtaaaattttctcagctaccaccgcgaacttccattcttcaacgactgccagtgagactttgtatgctacgatactgaagtgtttgcgtgagttgcacttcagatacgatgaatgtctgcagggagcaaccgaagttgttagtgatttgtctgtagtgagtgtaggatctggagtccacaactatgctcaagttatcgctgcctttttcgaaagattcttcaggaaacacgatattcctctgtcggcaaattatgcctctagagtagcccagtatctcattagcgctatgggctcaagcgttgcaagcgcagatgcttcgtcctcatcaggtacgtcttc

SEQ ID NO: 622 - DNA, 530 bp, synthetic construct
  misc_feature 1..530: note = Description of Artificial Sequence: Synthetic polynucleotide
  source 1..530: mol_type = other DNA
gaagacttagcaggtgcagcggctacgtccagcagcacatctggagcctcagcatcttccatttcatcaaccactgcatcaagctcaagtacgggagcttcctccgctgcagctggcgccagtcacggtgctgcatccgccggtggcgcattcgattttacaagagctttattttcagaactgctggaatcaaaaattttttctgccactaccgcgaattttcattcgtccaccactgcttctgagacactttacgccaccatattaaaatgtttgcgtgaattgcactttcgatatgatgaatgcctacaaggagctacagaggttgtatcggatctgtctgtcgtgtccgttggaagcggtgttcataactacgcacgcgttatcgccgctttcttcgaaaggttttttagaaagcacgacatcccactgtcagctaactatgcttctagggttgctcaatacctgatctcagcaatgggatctagcgtcgctagtgctgatgcgtcctcctcttcaggtacgtcttc

SEQ ID NO: 623 - DNA, 530 bp, synthetic construct
  misc_feature 1..530: note = Description of Artificial Sequence: Synthetic polynucleotide
  source 1..530: mol_type = other DNA
gaagacttagcaggtgcagctgcaacaagttcatcgacttctggcgctagcgcttcatcaatatcttcgactacagctagcagtagttccacaggtgcttcatcggcagcagcaggagcaagtcatggtgccgcttcggcgggaggagcttttgatttcacaagagccctattttctgagctactcgaatctaaaatcttctccgctacaaccgctaatttccactcatcaactacggcctcagaaacattgtatgcgactattcttaaatgcctaagggagttacactttcgttatgatgaatgcttgcaaggagcgactgaggtagtgagtgacctctctgtagtatctgtcggcagtggtgttcataactatgccagggtaatcgccgcattcttcgagcgattttttagaaaacacgatataccacttagtgctaattacgcctcccgggtggcacagtacttgatttctgcaatgggttctagcgttgcttctgcagatgcctcttccagttcaggtacgtcttc

SEQ ID NO: 624 - DNA, 530 bp, synthetic construct
  misc_feature 1..530: note = Description of Artificial Sequence: Synthetic polynucleotide
  source 1..530: mol_type = other DNA
gaagacttagcaggtgcagccgccacaagtagctccacatctggtgcctcagcttcatctatttcctcaactacagccagctcttccagtactggagcttctagcgcagcagctggtgcttcacatggagcagcttccgctggaggtgctttcgacttcacaagagccttgttctctgagctgctggagtcgaaaatcttctctgcaacaactgctaatttccattcgtcaactactgctagtgaaactctatatgctacaatcctaaagtgtcttagggaattacattttagatatgatgagtgcttacagggagcgaccgaggtggtcagcgatttatctgttgtctcagtcggaagtggtgttcataattacgctagagtgatagcagcatttttcgagagattcttcagaaagcatgatatcccgcttagcgccaattacgcgtctagagttgcccaatacctgatatctgccatgggttcatctgtagcttctgcagatgcttcatcatcatcaggtacgtcttc

SEQ ID NO: 625 - DNA, 560 bp, synthetic construct
  misc_feature 1..560: note = Description of Artificial Sequence: Synthetic polynucleotide
  source 1..560: mol_type = other DNA
gaagacttagcaggtgctagttcgacaacgaccgccacatcggaatcaggaattactgcttcctcagttgcaactggagcagccgctgccatttctaagactgcagccggtagtagttctattacttacctagctcgctcgttttccagatcattagtgagttatttattgcaaagcgcagaattccattcggttttttacagtggaatttcgtctggtattgcttcgcatatagcctccaccgccggaacatctactgcagagtcactggacctcgctagcctcaaatctgtcatagcaacagcctgcggaaaagctatggctgctacaaattccgagggaggtcctcatgctttcgctaatagtctaggatccgccataaccgcggttttgatcgaaaacgctattttaacaagcgagaattacgattattttgcaaaagaattcgcccacatcttttcaatttctgcatcgaaggtagtatcagctactagtgcaaagtctgcaagtgaggccacaagtgcttcttggacggctgcatctcgtacaggtacgtcttc

SEQ ID NO: 626 - DNA, 560 bp, synthetic construct
  misc_feature 1..560: note = Description of Artificial Sequence: Synthetic polynucleotide
  source 1..560: mol_type = other DNA
gaagacttagcaggtgctagctccaccactaccgctacctctgaatccggaattacagcttcatcggttgccacaggagctgctgcagccataagtaaaactgcagcaggatcttctagcatcacctatttggccagatcatttagtaggtcattggtgagttatttgttacaaagtgccgaattccactccgttttctactctggaattagttcaggtattgccagtcatattgcttcgacagcaggtacgtctacggctgaatctttggacctggcttccctgaagtccgtgatagcaactgcctgtggtaaagctatggcggctactaactctgatggtggaccacacgcctttgccaattccctgggttccgccattacggccgttttgattgaaaacgctattcttacgtcagagaattatgattattttgctaaagaattcgcacacatattctccatttctgcatctaaggtagtaagtgccacctccgcaaaatctgcaagtgaagccaccagtgcttcgtggacagctgcgtcacgtacaggtacgtcttc

SEQ ID NO: 627 - DNA, 560 bp, synthetic construct
  misc_feature 1..560: note = Description of Artificial Sequence: Synthetic polynucleotide
  source 1..560: mol_type = other DNA
gaagacttagcaggtgctagctctactaccactgccaccagcgaatcaggcattacagctagcagtgtcgcgactggagcagctgccgcaatttccaagacagctgctggtagttcgtctataacctatctagcaaggtccttttcgagatcactagtttcctacttgctgcaaagtgccgaattccattccgttttttattccggaatcagctctggtatcgctagtcacatagcttccacggctggtacttctacggctgaatcgttggatttagccagtctcaagtcagtgattgccacagcttgtggtaaggccatggccgcaactaatagtgagggtggtccgcatgcctttgcaaattcactaggaagcgctattactgctgttttgatcgagaatgccattttgacctcagaaaactacgattacttcgcaaaggagtttgcccatattttcagtatttctgctagtaaagtcgtgagtgctacatctgctaagtccgcttctgaagccacatcagctagttggacagcagcttctagaacaggtacgtcttc

SEQ ID NO: 628 - DNA, 449 bp, synthetic construct
  misc_feature 1..449: note = Description of Artificial Sequence: Synthetic polynucleotide
  source 1..449: mol_type = other DNA
gaagacttagcaggtgctggcgctggagctggagtaggtgtgggcggtgcaggcggttacggtcagggttacggtgctggagctggagcaggagctggagctggagctggtgcaggtggagctggaggttacggccagggttatggagctggtgcagcagctgctgctggagctggtgctggtgcagctggtggctacggaggaggttcaggagcgggtgctggtggtgctggaggttatggtcaaggatacggtgcaggttctggagccggtgcgggagccgctgcagcggccggtgcatctgctggagccgctggtggctatggtggaggagctggagttggtgctggagctggcgctggtgctgcaggtggttacggccaatcatacggatcaggtgctggagcaggtgcaggagcaggtgctgctgctgccgcaggtacgtcttc

SEQ ID NO: 629 - DNA, 389 bp, synthetic construct
  misc_feature 1..389: note = Description of Artificial Sequence: Synthetic polynucleotide
  source 1..389: mol_type = other DNA
gaagacttagcaggtggagctggtggcggtggacaaggcggacttggatcgggaggagccggacaaggttacggagctggtctaggaggtcagggtggagcctcagccgccgccgctgcagctggtggtcaaggaggtcaaggtggtcagggtggatacggtggattaggatctcagggagcaggtggagctggtcaactgggatatggtgcgggccaggaatcggctgccgcagcagccgctgccgcaggcggtgcaggtggtggtggtcagggaggtttgggtgctggcggcgctggtcaaggttatggagccgcaggtttgggtggacaaggaggagccggccaaggaggtggatctggagcagctgccgctgcaggtacgtcttc

SEQ ID NO: 630 - DNA, 638 bp, synthetic construct
  misc_feature 1..638: note = Description of Artificial Sequence: Synthetic polynucleotide
  source 1..638: mol_type = other DNA
gaagacttagcaggtggttacggaccaggttcaggtcaacagggaccgtcacagcaaggaccaggacaacagggaccaggaggccagggcccatatggaccaggtgcatctgcagctgctgctgcggctggcggttatggtccgggatcgggtcagcaaggtcctggtggacagggaccttacggacctggatcttctgcagcagctgctgcagcaggcggcaatggcccaggttctggacagcaaggtgctggacaacaaggcccaggtcagcagggacctggagcatccgccgcggcagctgctgcaggtggttacggacctggttctggacaacagggtcctggtcaacagggacctggaggtcaaggtccttatggtcccggtgcatccgcagcagctgctgctgctggcggttacggaccgggatctggtcaaggtcctggccagcaaggcccaggaggacaaggtccctatggtccaggtgcatcagctgctgctgcagcagcaggtggttatggtccaggatcaggtcaacaaggtccaggtcagcaaggtccaggtcaacaaggacctggtggtcagggtccatatggcccgggagctagtgccgctgctgctgctgcaggtacgtcttc

SEQ ID NO: 631 - DNA, 743 bp, synthetic construct
  misc_feature 1..743: note = Description of Artificial Sequence: Synthetic polynucleotide
  source 1..743: mol_type = other DNA
gaagacttagcaggtggatacggaccaggctatggacaacagggtcccggccagcaaggtccgggtggacaaggaccttatggtcctggtgcttcagctgcaagtgctgcatctggtggatatggtcctggttcaggacaacaaggcccaggtcaacaaggaccaggtggtcaaggtccatatggccctggagccagtgccgccgccgctgcagcaggtggatacggaccaggttcaggtcaacaaggtcctggacaacaaggtcccggtcaacaaggccctggacagcaaggaccaggcggacaaggcccttatggaccgggtgcttctgcagctgctgccgccgccggtggttatggtccaggatctggtcaacagggaccaggccaacagggaccaggtcagcaaggtccaggacagcaaggacctggacagcagggtcctggacagcaaggtccaggacaacagggacctggtcagcaaggcccgggccaacaaggtcctggtggacaaggtgcttacggacctggtgcctctgctgccgctggagccgcaggcggatacggtcctggatccggtcagcaaggccctggtcaacaaggcccaggtcagcaaggaccgggtcaacaaggacctggccagcagggccctggtcagcaaggcccaggacagcagggacctggtcaacaaggtccttatggtcccggagcgtctgctgccgcagctgcagcaggtacgtcttc

SEQ ID NO: 632 - DNA, 719 bp, synthetic construct
  misc_feature 1..719: note = Description of Artificial Sequence: Synthetic polynucleotide
  source 1..719: mol_type = other DNA
gaagacttagcaggttcgggacctggtggttatggtccagagaatcagggcccctcaggtccgggtggttacggaccgggtggctccggatcctctgccgccgccgccgcagcggccgcttccggacctggcggatatggtcctggctcacaaggtccttcaggaccgggcggtagtggaggttatggtccaggcagtcaaggagcttcaggaccaggtggtcccggtgctagtgcagctgctgcagcggccgcagccgctgcatctggtccaggtggttacggacctggaagtcagggtcctagcggtcctggagcttatggtcctggtggtccaggttcttcagccgctgctgctgccgctgctgcatctggtcctggaggatatggtccaggctcccaaggaccttctggtcctggtgtctatggcccaggaggaccaggatcatccgctgcagctgcagctgccgccggaagtggccctggtggctatggtccagaaaatcagggaccttctggtccaggcggttatggacctggaggttctggatcatctgccgccgcagctgccgctgctgcctcaggaccgggtggatatggacctggatcccaaggcccgagtggtccaggaggatcaggaggatatggaccaggatcccagggaggttcaggaccaggagcttctgcagctgctgccgcagcggctgcaggtacgtcttc

SEQ ID NO: 633 - DNA, 602 bp, synthetic construct
  misc_feature 1..602: note = Description of Artificial Sequence: Synthetic polynucleotide
  source 1..602: mol_type = other DNA
gaagacttagcaggttcagcaacatccagtactacaaccactacgaccgtgtcgaagtccgcagccgcagcagcggcagcagcagctgctgcttcatcagcttcctctgcctcgcgtgattctgataggtcaagcactgcagcagaggcttatgctagttcgtctgcctacgctagttctaacttcgagaactacttagcttcagatttgagcaattcagatgaattcgagagtgtctatggctcgctgtattctagtgctgacgctgcgtcgtacgcacgaagtagcgctgagtacgcgtcgaatactttaggattgtccaaagaaacatcgtacgccttagcatccgctgcggctaaagctgtttctgaatccggcagtggttcatcaagttacgctagagcttacgcagttgctaaatcaagcgccgtagtgttacaaaactcgggtgtacttagctcttcaaactcccgatcactcagtagtgccttcgccaaagcttttgcaagttcctccgcatcttcctatgcttcatatcaatcgcgaaacacaggcacatcaagagcaagttcagccggttccggagctgcaggtacgtcttc

SEQ ID NO: 634 - DNA, 602 bp, synthetic construct
  misc_feature 1..602: note = Description of Artificial Sequence: Synthetic polynucleotide
  source 1..602: mol_type = other DNA
gaagacttagcaggttctgcaacctcctcaaccactacgactactaccgtatctaaatcagctgctgcagccgctgctgctgccgctgcagctagtagcgcatcaagcgcttcacgagattcggacagatcatcgactgctgcggaggcttacgctagttcgtctgcttatgcttcaagtaattttgagaactatttagcctcagacctcagcaactctgatgaattcgagtccgtctatggtagcgtatattctagcagtgacgccgcttcttacgccagatcttctgccggctatgcaagtaacacattgggtttgtccaaagaaacaagttacgctctagcctcggcggccgcaaaagccgtttccgaatctggttcgggatctagttcatacgctagagcatatgctgttgctaagtcatccgcagctgtgctgcaaaattcaggtgttctttcttctagcaatagccgttccttatcaagtgcctttgctaaagcctttgcttcttcgtctgcatcttcctatgcttcttaccagagtaggaataccggaacatctagagcatctagtgccggaagtggagccgcaggtacgtcttc

SEQ ID NO: 635 - DNA, 602 bp, synthetic construct
  misc_feature 1..602: note = Description of Artificial Sequence: Synthetic polynucleotide
  source 1..602: mol_type = other DNA
gaagacttagcaggtagtgcaacaagcagcaccaccactacaactactgtctcaaagtcagctgcggcggccgccgctgccgcagcggctgcatctagtgcctcgtcggcatctagggactccgataggtctagtacaaccgctgaggcgtatgcgtcgtcctcagcttatgcttcatccaactttgaaaattacttggcttccgatctgtctaacagtgatgaattcgaatcagtgtatggtagtgtgtattcctcatctgatgcagcatcgtacgctcgtagcagcgcaggttacgcttctaatacccttggactctccaaggaaacctcttacgctttggctagtgcagctgctaaggcggttagtgagtccggttccggatcgagttcctatgctcgagcttacgctgtagccaaatcttccgcagttgtcttgcagaacagtggagtactctcatctagcaactccagatcgctgtcaagcgcattcgctaaggctttcgcttcatcatctgcctcgagttacgcctcttacaagtctagaaacactggtacttctcgcgcgtcaagtgcaggatcgggcgccgcaggtacgtcttc

SEQ ID NO: 636 - DNA, 602 bp, synthetic construct
  misc_feature 1..602: note = Description of Artificial Sequence: Synthetic polynucleotide
  source 1..602: mol_type = other DNA
gaagacttagcaggttccgctactagttcaacaactaccactactactgttagtaagtctgcagctgctgcagccgctgcagcagctgccgcctcatctgcctcgtcagcctccagagattccgatagatcttcaacggcagcggaagcttacgcttcttcctcagcatatgcgtcaagcaatttcgaaaactatttggcttctgatctgtcaaattcagatgagtttgaatctgtctatggatcactctactctagttcagacgcagcatcttatgctagatcaagcgccggatatgcttcaaacaccctcggtctttctaaagaaacttcctacgctttggccagtgctgcagcaaaagcagtttcagagtccggtagtggtagttccagctatgccagggcctacgctgtggcaaaatcttcagcagtcgtattacaaaatagtggcgttctgtcaagctcaaacagtagatctctatccagtgcctttgcgaaagcctttgcttcttcatcagccagttcttacgctagttataaatctagaaataccggtacatctagggcatcctcagccggttcaggagccgcaggtacgtcttc

SEQ ID NO: 637 - DNA, 602 bp, synthetic construct
  misc_feature 1..602: note = Description of Artificial Sequence: Synthetic polynucleotide
  source 1..602: mol_type = other DNA
gaagacttagcaggttcggcgacaagttcaactacgaccacaacaaccgtgtcgaagtctgctgcagcggccgcagcagcagctgcagctgcttcgagcgcatctagcgctagacgcgactctgacagatcttcctctaccgctgaggcttatgcttcttcgtctgcttacacctctagtaactttgaaaactacctggcatctgatctatcctcaagtgatgaattcgaatctgtctacggttctctttattcctcttcagacgctgctagctatgctcgttccagtgccgagtacgccagtaataccttgggactatccaaagaaacttcatatgctctggcatcagccgcagcaaaggctgtatcagaaagcggtagtggatccagctcgtatgcacgagcttacgccgtcgctaaatctagtgcagtagtacttcaaaattctggcgtactgtcgagcagtaattctaggtctttgtcctctgcattcgctaaagcatttgcttcctcatctgcttcttcctacgcaagctacaagagtaggaatactggcacatctagagctagttctgccggttcaggtgccgcaggtacgtcttc

SEQ ID NO: 638 - DNA, 602 bp, synthetic construct
  misc_feature 1..602: note = Description of Artificial Sequence: Synthetic polynucleotide
  source 1..602: mol_type = other DNA
gaagacttagcaggttcagccacctctagtactacaactactactactgtatcaaagtctgctgcagctgcagcagctgccgccgctgccgcttcgagtgcatcctctgccagccgcgacagcgacagatcctcaaccgcggcagaagcttatgcatcatcctcggcctatgcctctagcaatttcgaaaattatctagcctcagatttgtctaattctgacgaatttgagagtgtgtacggttcgttgtacagctcagcagacgctgcatcctacgctagctcctcaagtgaatatgcctccaatactttaggtctttcaaaggagacatcctatgcattggctagcgctgctgctaaggcggtttcagaaagcggttctggatcttccagttacgctagagcctacgctgtagcaaagagttctgccgttgttttaagaaacagtggtgtgttaagtagcagcaactcaagatcgctgtcatccgcgtttgccaaagccttcgcctctagttccgcttcttcatatgcttcttacaaaagtagaaacaccggaacctcacgtgctagctcggccggcagtggtgcagcaggtacgtcttc

SEQ ID NO: 639 - DNA, 602 bp, synthetic construct
  misc_feature 1..602: note = Description of Artificial Sequence: Synthetic polynucleotide
  source 1..602: mol_type = other DNA
gaagacttagcaggtagcgctacatcttcgacaacaactacaactaccgttagcaaaagtgcagccgctgctgctgccgctgcagcagctgcatcctctgcaagtagtgccagaagagattccgacaggtcatcgagtaccgcagaagcttacgcctcctcatcggcgtacactagcagtaacttcgaaaactacttggcttctgatctaagttcttcagacgagttcgagtctgtttacggaagtctgtattcttcttctgatgctgcttcctacgcaagatcatctgcagagtatgcttctaacactttgggcctgtccaaagagacgtcctacgctctggcaagcgccgctgcgaaggcagtttcggaaagcggttctggttcttctagctatgccagggcatacgctgttgctaagtcatctgccgtggttttgcagaattccggtgtcttgagctcctctaattctagatccttatcttctgctttcgcaaaagctttcgcctcttcatcagcttcatcctatgcttcttctaagagcagaaacactggaacttctagagctagtagtgcaggtagtggagccgcaggtacgtcttc

SEQ ID NO: 640 - DNA, 533 bp, synthetic construct
  misc_feature 1..533: note = Description of Artificial Sequence: Synthetic polynucleotide
  source 1..533: mol_type = other DNA
gaagacttagcaggtagtgccagatcatctagcgctgctgcggccagcgccgctgctttctcatctttaagtagagccttaatttatcgccttcagcaaaaccaagactttatatacaccttcaactctattgaaacgtccgatgcagcaagggctataacatactcttctgctctggcagccgctaacgctatgggtgcaggctcgtccgcttcccaggctgtagccttcgctgcagctaaagccgctgaaggtgtccctataagaagctcttcatacgcttatgctgaagccatcactaacgcaattactcctcattttttagccctgcatctagtgaatagtgctaacgtcgatgcttttgcctctgactttacttcctcatttgcaagtgccacggcgtccgccgcgagcgcttcagcagctgctagttccgcagcatccgctgctgcagccgcaactgcatcatccagttctaccagtacatcaacaaaaactactagttcggccgcagcagcagcaggtacgtcttc

SEQ ID NO: 641 - DNA, 548 bp, synthetic construct
  misc_feature 1..548: note = Description of Artificial Sequence: Synthetic polynucleotide
  source 1..548: mol_type = other DNA
gaagacttagcaggttctgccatttctagcagtgccgctgcagcgagtgcagctgccttttcttctagtctctctcgagccttgatttatagattgcaacagaaccaagatttcatttatacatttaacagcattgaaacctcagacgccgctagggctatcacctatagttctgcactcgctgccgcaaatgctatcggtgctggtagtagcgcatcccaggcggtggcctttgctgctgccaaggctgccgaaggagtaccaataagaagtagctcctacgcctatgctgaggctattacaaatgcaataaccccgcactttcttgcttcccacctggttaatagcgccaacgttgatgcttttgcgtctgattttacaagctcgttcgcatctgcaactgcctcggcagcctcagcatctgcagctgcagcctcatcagctgctagcgctgcatccgctgctactacaaccgcttcctcctctacatcaacttctactacgacaacctcttcgacagcagccgctgccgccgcaggtacgtcttc

SEQ ID NO: 642 - DNA, 548 bp, synthetic construct
  misc_feature 1..548: note = Description of Artificial Sequence: Synthetic polynucleotide
  source 1..548: mol_type = other DNA
gaagacttagcaggtgcagctgccagctccagagctagagcacaagctgcagccgcatcctctgctgctgcgtcggcggcagcagcttccagtgcatttgcagaagaactggcatttttgctgtggcaatctcaggacttcatcagtgcttttggatctactgccagttctagcgaagcaaccgcattagctcgttcctcagtaatggcagctgcaagagccgttggagtagctgaggctgcttccgctattgcaagtgctgcggctagtgcagcagcaggtgtctcacacggatcgtccgctgttgcttacgctagagcaattgcctccgccgttgctagagcttttgcccaatttggtatattaactctcagtaatgccgctgcctttggacgccaattcgctagatcctttagctctagcgcagctgcttcggcagcttcagctgcatctgcttcggctgcgagcgcaaaaagcgctgctgctgccgctgcttcttcatccacgacttcaacgagtactacaaccacttccacaggtacgtcttc

SEQ ID NO: 643 - DNA, 548 bp, synthetic construct
  misc_feature 1..548: note = Description of Artificial Sequence: Synthetic polynucleotide
  source 1..548: mol_type = other DNA
gaagacttagcaggtgcagctgctagttcaagaactcgtgcccaggcagctgccgcgagttccgccgccgcaagtgcagctgctgcatcaagtgcattcgcagaggagttaacatttttgttacgacaaagcccgaactttatctcagcctttggttcaacggcttcaagttctgaagctacagctctggccagaagttccgcaatcgctgccgctcgagctgttggagttgcaggagctgcttctgccatagcttctgcagcagctagtgcagcggctggtgtgtcccatggttcttcagctgctgcctatgctagagccattgcttttgccgttgctcaagcttttgccccgtttggaatcctcacattggccaaagctgccgcttttgcttctcaattcgcgcgatcattttcttctagtgctgcggcgtctgctgcttcagccgcttctgcgagtgctgcctcggcgaagtcagccgctgctgcagctgcctcatcatcaactacatccacaagcaccactacaacatccacaggtacgtcttc

SEQ ID NO: 644 - DNA, 548 bp, synthetic construct
  misc_feature 1..548: note = Description of Artificial Sequence: Synthetic polynucleotide
  source 1..548: mol_type = other DNA
gaagacttagcaggtgctgcggcctcctcgagagctcgagcagaagcagctgcggcatctagcgctgctgcttctgctgctgccgccagctctgcctttgccgaggaacttacttttttactacgccaatcccctaactttatcagtgcttttggatccacggctagttcttcagaagcaaccgctttggcaagatcttctgcaattgcagccgctagagccgtgggcgtcgctggtgctgcctctgctatcgcatcagcggcagcgtctgccgctgctggcgtttctcacggatcaagtgctgccgcctatgccagggctatcgcctttgcagttgcgcaagctttcgcaccttttggtatactgactttagctaaggcagcagcctttgctagtcaattcgctagaagcttcagctctagtgctgctgcctccgctgcaagtgcagcatctgctagtgcggcttctgctaagtcggcagcagctgctgcagcatcgagttctaccactagtactagtactacgaccaccagtacaggtacgtcttc

SEQ ID NO: 645 - DNA, 563 bp, synthetic construct
  misc_feature 1..563: note = Description of Artificial Sequence: Synthetic polynucleotide
  source 1..563: mol_type = other DNA
gaagacttagcaggtgctgcgtctgccgccggtgcaagcagtgcagcagcagcatccgcctcggcggcagcagcgagcttcacacaaaatttgatttacagcttgcaagaatccgaaattttttattctgcattaaggagtattgcctcttccggtgaagccagtaacctggcatacttggcagctgagcgagctgcttatggagctggactagacggtattgcaagctcagttgcttcagctgctgcgagcgctttcgctaataccgctttaggttctggagcagccgcctatgcgaaggccctagcatatgctatagcccctgttttaactcgagccaatattattaccctttctaatgctgcctctttggctaccacatatgcaaagggattcgcatctagtgcagccagtgccgcggcctcagccagcgctgcttccgccgctgctgcaagctccgctgcctccgcttcctcagccgcagccgctgcggcggcttcttccagcactagtacaagtactacagtctctcgatctacagccgcagctgcaggtacgtcttc

SEQ ID NO: 646 - DNA, 572 bp, synthetic construct
  misc_feature 1..572: note = Description of Artificial Sequence: Synthetic polynucleotide
  source 1..572: mol_type = other DNA
gaagacttagcaggtgctgcctccgcagcaggtgcagctggagcatcctcagctgctgctgcttccgcctctgctgcagctgcttcattcacaagaaacctgatatactctctccaagagtcagagattttctacagtgctttacgaagcattgctagctctggagaagcatcaaatcttgcttacttggctgcagaacgcgcagcatacggtgcaggtttggatggtatcgcaagttcagttgcctccgctgctgccagcgccttcgctaacactgcactgggttcaggtgctgctgcctatgcaaaagctctggcttatgctatcgctcctgtgcttactagagctaacattataacactgagtaatgccgcctccttagctacaacatacgccagaggctttgcctcgagtgccgcctctgccgctgcgagcgcttctgcagcatctgccgcagccgcttcatccgcagcgtccgcatctagtgctgccgccgctgcagcagccagctcctcaacaagcacttccacaacagtgtccagaagcactgcggcagctgcaggtacgtcttc

SEQ ID NO: 647 - DNA, 572 bp, synthetic construct
  misc_feature 1..572: note = Description of Artificial Sequence: Synthetic polynucleotide
  source 1..572: mol_type = other DNA
gaagacttagcaggtgctgcaagcgctgcaggagctgctggagcttcctccgcagctgctgcttcagcctctgctgctgctgcatcttttacaagaaacttaatttactcccttcaagaatctgagattttttactcagctttgagatcaatcgctagtagcggtgaagcatcaaatctagcctatttggcagctgaacgagctgcatatggagctggactggatggtattgcttcctccgttgcttctgccgccgcttctgcttttgcaaacacagctttgggtagcggagctgctgcctacgctaaagcactagcctatgcaatcgccccagttttgactagagcgaatattatcactttgtcaaacgctgcaagcctcgctacaacttacgctagaggattcgcttcaagcgctgcctccgctgcggcttctgccagcgcagcttcagcagctgcagcctccagcgctgcttctgcttcttccgctgccgctgctgcagctgcttcttcatccactagcacctccacaacagtttctaggtccactgctgcagccgcaggtacgtcttc

SEQ ID NO: 648 - DNA, 566 bp, synthetic construct
  misc_feature 1..566: note = Description of Artificial Sequence: Synthetic polynucleotide
  source 1..566: mol_type = other DNA
gaagacttagcaggtgctgctagcgctgctggcgcagccggagcttccagcgccgctgctgctagtgcctcggcagccgctgcctctttctctaggaacctgatatattcgctgcaagaatctgaaattttttatagcgccttgagatctatcgcctccagcggagaggcatcaaatttggcctatctagctgctgagagagctgcttatggcgcaggtctagatggaatagcttcatctgtcgctagtgctgctgcctctgctttcgcaaataccgcacttggtagtggtgctgccgcctacgcaaaagctcttgcatacgctattgctcctgttttaaccagagcgaatattattactttgtcaaatgcagcaagtttagcaacaacctatgccagaggtttcgcttcttcggcagcttctgccgctgcgtctgcgtccgccgcttctgcggcagcggcttcatctgcagctagcgcaagttccgcagctgcagctgcctcatcttcaacttctactagcacaactgtctccaggtccactgcagcagctgcaggtacgtcttc

SEQ ID NO: 649 - DNA, 548 bp, synthetic construct
  misc_feature 1..548: note = Description of Artificial Sequence: Synthetic polynucleotide
  source 1..548: mol_type = other DNA
gaagacttagcaggtgcagcatcagctgctggagccgctggcgcctcatctgccgcagcggcgagtgcgtccgccgctgctgcttcatttacccgtaacttgatctactcacttcaggagtccgagattttctattcagcccttagatctatcgcgtcctcaggagaagcctctaatttggcatatttagctgcagagcgtgccgcttacggagctggtttggacggaatcgcttcttcggtcgctagcgcagctgcatctgcatttgcaaatacagctttgggatcaggtgccgctgcttatgccaaagccttggcatatgcaattgcacctgttcttaccagagctaacataattacgctgtcaaacgctgcaagcctagctactacatacgctaggggttttgcttcttctgctgcctccgctgccgctagtgccagcgcagcctctgcggcagccgccagttctgcagctagtgctagttcctcatctgctgctgctgcagcagcttcatcatctactagtactaaagctacaggtacgtcttc

SEQ ID NO: 650 - DNA, 530 bp, synthetic construct
  misc_feature 1..530: note = Description of Artificial Sequence: Synthetic polynucleotide
  source 1..530: mol_type = other DNA
gaagacttagcaggtgctggagccggcgctggagctggcgccggagcaggctattcggccggcgctggttacggtattggagctggagccggagtgggcgctggtgctggtgcaggcgcaggtgccggatctggtaccggtactggagccggatatggttacggatcttcaacccaatctagctccaccatttacgctgctacctaccagggtggttatggacgagttgcaggcctgggtgccggagctggtgcaggtgcaggtgcaggaggaggtgcaggtgccggagcaggtacaggtgccggagctggagcaggaataggtgctggttatggtgctggcgcgggttatggagccggagctggaaccggctccggagcaggtgccggtgcaggaggaggcgcagcagctggtgctggttcgggtgttggtgcaggctacggtgcaggagctggctatggagccggagccggagccggtggtggagcaggtgcaggagccggaagcggtgcttcagcaggtacgtcttc

SEQ ID NO: 651 - DNA, 545 bp, synthetic construct
  misc_feature 1..545: note = Description of Artificial Sequence: Synthetic polynucleotide
  source 1..545: mol_type = other DNA
gaagacttagcaggtgctggatacggtgcaggtgctggtgcaggaggtggagccggagctggtactggatatggtggaggtgctggatacggcacaggctctggtgcaggctacggtgcaggagtaggatacggagcaggcgccggagcaggtggtggagcaggagccggagccggcggtggtactggtgccggagccggtggtggagcaggtgcaggctatggagcaggaactggctatggtgccggagctggcgccggtggaggcgcaggagccggagctggcgctggtgcaggagccggtgctggtgccggttcaggtgcgggtgcaggatacggagccggcgctggttacggtgctggcgctggagctggtggagttgccggcgctggagctgccggaggcgctggagcagcaggtggtgcaggagctgccggtggagcaggtgccgccggaggcgccggtgccggtgccggagctggttctggagctggtgctggtgctggtggtggtgctcgtgctggagccggaggaggtacgtcttc

SEQ ID NO: 652 - DNA, 563 bp, synthetic construct
  misc_feature 1..563: note = Description of Artificial Sequence: Synthetic polynucleotide
  source 1..563: mol_type = other DNA
gaagacttagcaggtgctggagccggtgccggatatggagccggagctggttacggagttggtgccggaggcggcgctggcgccggtgcaggagctggtggcggagctggtgcaggcgctggtggaggtgctggagctggagccggatccggcgccggagcaggagcaggaagtggagctggtgctggagcaggtggaggcgccggtgccggtgcaggttcgggtgcaggagccggcgctggttatggcgcggacgcaggtgtaggtggtggtgctggtgctggaaccggttatggtggaggtgccggttatggttctggagctggcgcaggctcaggtgcgggagccggtgctggatatggagcaggagccggttccggaaccggagtgggattcgttgctggtacttctaatagagttgcatcaactacttatagtactatgtacgcaaccggttataatggtggagtcggtgccggagcaggtggaggagccctctctcgtctcttggccgctggttatggagctggtggtggaactgcaacaggtgcaggtacgtcttc

SEQ ID NO: 653 - DNA, 545 bp, synthetic construct
  misc_feature 1..545: note = Description of Artificial Sequence: Synthetic polynucleotide
  source 1..545: mol_type = other DNA
gaagacttagcaggtgctggatatggcgccggagctggcgctggtgctggttccggagcgggattaggtgcgggcgcaggtgctggtttcggtgctggagctggcgccggtgtatcagcaggagcaggtgcaggtattggagcaggagctggtgctggtgtcggagccggagctggtgccggcttcggagccggagcgggcgcgggtgttggagctggtttcggcgccggtgccggtgctggtgtaggagccggtgccggtgcaggcgttggagctggagccggtgctggttctggtgcaggagtcggtgctggtgttggagcgggatttggtgctggcgtaggcgcaggagttggtgcaggcgcaggagcaggcgcaggcgtcggagctggagctggagtgggagccggtgcaggagccggtgtaggtgctggtgctggcgcaggagttggagctggtgccggagctggtgttggtgctggagcaggtgctggctttggcgcaggagtgggagcaggcgtcggagccggagcaggtacgtcttc

SEQ ID NO: 654 - DNA, 497 bp, synthetic construct
  misc_feature 1..497: note = Description of Artificial Sequence: Synthetic polynucleotide
  source 1..497: mol_type = other DNA
gaagacttagcaggtattggtgctggcgccggtgcaggatccggagttggtgcaggagctggcgcaggtagtggaaccggaaccggtgcaggttacggttacggctcttcagcacagtctctctccactcgttattctggagcttatcaaggtagttacggaggtgccggtgctggagctggtgcaggtgcaggagccggtgctggtgctggttctggcgcaggagctggctccggaactggatatggtgccggatcaggtgctggtgccggtgctggtagcggttctggagccggtgctggcaccggcgctggatatggtgctggttcaggcgctggagttggcgttggagccggtgccggttctggttacggcgccggaggaggtgctggagccggagcaggagctggtggaggagctggagctggtaccggtggcggtactggagcaggtgctggtgctgtatacggtgcaggtgccggtgcaggtacgtcttc

SEQ ID NO: 655 - DNA, 500 bp, synthetic construct
  misc_feature 1..500: note = Description of Artificial Sequence: Synthetic polynucleotide
  source 1..500: mol_type = other DNA
gaagacttagcaggtgctggactaggtgctggtactggcgccggtgccggagctggtgcttctgctggaacaggaacgggatatggtcttggcagatacgcccaaggtaccagtgtcacatactcctccacctacggtaatggttactacggaggtttgggagctggatctggaacaggtgctggaggtggtgccggtgcaggagctggatccgccgctggtgccggtgctggtgccggctcaggcgcaggtttaggtgctggtgctggagcaggtgcaggtgcgggctttggtgcaggtgctggtgcgggtgtcggagcaggagctggtgctggaatcggtgctggagcaggagcaggtgttggcgccggagctggagccggctttggcgctggagtaggtggtggtgctggtgctggttccggagctggtgttggtgccggagtgggagctggtgtaggagccggtgcagtggtaggagctggagcaggtacgtcttc

SEQ ID NO: 656 - DNA, 563 bp, synthetic construct
  misc_feature 1..563: note = Description of Artificial Sequence: Synthetic polynucleotide
  source 1..563: mol_type = other DNA
gaagacttagcaggtgcctattctgcagctgctgccgctgcagctactgctacatccggcggagcccctggaggttatggcggttatggcccaggtattggtggtgcctatggtccggcttcttccaccggaacaggtagtggcagtggctcaggcgccggcgctgctggaggaggaggatctggcggtcttggttcaagtggtggaaatggtggtttgggaagcggaaacggaggttctggtgcatcagcagctgcatcggcttctgccgcgagctcatcccctggaagtggaggctacggtccaggacagggagccggattcggctctggctcggcagctgctggtggatctggcacaggctcaggtgccggtggtcctggatcaggaggctatggtggacctcaattttttgcatccaacacgttcgcctcagcctacggaggtcaaggtctattaggaacatctggatatggcactggtcaaggtggagcttctggaactggctcctctggtggcggcggttcaggttcaggaacgggatctaactcaggtacgtcttc

SEQ ID NO: 657 - DNA, 548 bp, synthetic construct
  misc_feature 1..548: note = Description of Artificial Sequence: Synthetic polynucleotide
  source 1..548: mol_type = other DNA
gaagacttagcaggtgcttcttcggctgctgcagctgctgctgctaccgctacatcgggaggagctccaggtggatatggaggatacggtccaggcatcggtggtgcatttgttcctgcttccactacaggtactggctccggctccggttccggtgctggagctgcaggttcaggaggacttggtggacttggttcatccggaggaagtggaggactaggtggtggaaacggaggatccggagcctcagctgccgcttctgcggcagctgcttcttcatcacctggtagtggaggttatggacctggacagggagtaggatctggaagtggcagcggtgcagcaggaggatcaggaaccggttctggtgcaggaggtccaggatcaggtggatacggtggtccacaattttttgcatcggcctacggtggtcaaggcttacttggtacatctggatacggtaacggtcaaggaggtgcctcaggaacgggtagcggaggagtgggaggttcgggatcaggagctggttctaattcaggtacgtcttc

SEQ ID NO: 658 - DNA, 722 bp, synthetic construct
  misc_feature 1..722: note = Description of Artificial Sequence: Synthetic polynucleotide
  source 1..722: mol_type = other DNA
gaagacttagcaggtggtgccggtagcggacaaggaggttacggtggacagggtggcttgggaggttatggccaaggcgctggagccggtgcagccgccgctactgctgctggaggtgctggatctggtcaaggagactacggtgaccagggaggcctgggaggatatggtcaaggatctggtgccggttcagctactgctcctgcagctggaggttcaggttttggacaaggtggattcggtaatagaggtggaaaaggtgcctatggacaatccgctggtgctggtgtcggcgctgcggccacagccgccgctggaggagcaggatcaggccaaggcggttatggtgaccaaggaggtttgggaggttacggacagggtgcaggagccggtgccgcatcggctgccgccggtggtggtgatggctacgaacaaggtggttacggtaaccaaggaggacttggcagttttggacaaggcgccggtgctggagctgccgctgcggcctccgccggaggtgccggatctggtcgaggtggatatggagatcagggtggtttgggtggttacggccaaggagctggtgctggagctgcttccgccgctgccggaggaggcgacggttatggtcagggctattatggcgatcaaggtggtagaggaggttatggtcagggttctggtgctggcagtgctacggcagctgctgcaggtacgtcttc

SEQ ID NO: 659 - DNA, 857 bp, synthetic construct
  misc_feature 1..857: note = Description of Artificial Sequence: Synthetic polynucleotide
  source 1..857: mol_type = other DNA
gaagacttagcaggtggtgcaggtttcggtcaaggcggatacggtcagggtggctatggcaaccaaggaggtttgggatcctttggacaaggtgctggtgctggcgccgctgccgccgcatcagcaggtggtgctggtagtggaagaggtggatacggcgaccaaggaggtttaggtggttacggccaaggtgcaggagcaggagcagcagctgctgcagcaggaggtggagatggatacggtcagggaggttatggaaaccaaggaggcctaggctcattcggtcagggagccggagccggtgccgcagctgccgcctctgctggaggtgccggctcaggacgtggtggttatggacaaggaggttatggcaaccagggtggtttaggttcattcggacaaggagctggcgctggtgccgccgccgctgcatccgcaggtggtgcaggttctggacgtggcggttacggcgaccagggtggattaggaggttacggtcagggcgctggatctggtgccgctgctgctgcagccggaggaggtgacggttacggacaaggcggatatggtaaccagggtggactcggttcctttggtcaaggtgctggagctggtgctgctgccgcggcatcagctggtggtgccggatcgggtcgtggtggatatggccaaggtggatacggaaaccagggtggactaggatcttttggacagggagcaggagcaggtgcggctgccgctgcatcagctggaggagccggatcgggtaggggaggatatggagatcaaggtggtctgggtggctacggtcagggtgccggagctggtgctgcctctgcagctgcaggtacgtcttc

SEQ ID NO: 660 - DNA, 530 bp, synthetic construct
  misc_feature 1..530: note = Description of Artificial Sequence: Synthetic polynucleotide
  source 1..530: mol_type = other DNA
gaagacttagcaggtggtggagatggctacggccaaggtggatacggtaatcaaagaggagttggatcctatggtcagggcgctggcgctggtgcagctgccacatctgccgcgggaggcgctggtagcggaagaggtggttacggtgagcaaggaggccttggaggttacggccagggagctggtgctggagcagctagtaccgctgcgggaggtggtgatggatatggtcaaggaggatacggtaaccaaggtggacgtggttcttacggacaaggatctggagcaggtgcgggagccgcagtagctgcagcggccggcggtgctgtttcaggccaaggaggttatgatggtgaaggtggtcaaggtggttatggtcagggatctggtgctggagctgcagttgctgccgcctctggtggaaccggcgctggtcaaggaggttacggctctcaaggttctcaagcaggttacggtcagggtgctggttttagagcagctgctgctaccgcggctgcaggtacgtcttc

SEQ ID NO: 661 - DNA, 512 bp, synthetic construct
  misc_feature 1..512: note = Description of Artificial Sequence: Synthetic polynucleotide
  source 1..512: mol_type = other DNA
gaagacttagcaggtgcatatgcttatgcatatgctattgctaacgcatctcagattgcagcttccgttgcctcagctgttgcctcaagcgcatcagctgcggctgccgctgcatcgagcagtgctgcagccgctgctggtgcatcctcggcggctggagctgcatcctcttcgtccactaccacaacaactagtacttctagctctgccgctgctgcagctgcggcagcggcagccgcttcagcaagtggagcttcaagtgcgtctgctgctgcatctgcttctgctgccgcttctgctttttcctcagccctaattagcgatctacttggtatcggagtctttggaaacacctttggctctattggttccgcttcagcagcttcatcgatagccagtgctgccgcacaagctgccttaagtggattaggtttgtcctacctagcttctgcaggtgcatcagcagtggcctcggccgttgccggagtgggtgttggagcaggtacgtcttc

SEQ ID NO: 662 - DNA, 515 bp, synthetic construct
  misc_feature 1..515: note = Description of Artificial Sequence: Synthetic polynucleotide
  source 1..515: mol_type = other DNA
gaagacttagcaggtgcttacgcgtatgcttatgctatcgccaacgctttcgccagtattttggcaaatacaggattactgtcagtttcgtcagcagcctctgttgcttcttctgtggcttcggccatagccacctctgttagttcatcttctgctgctgcagccgcttcagcttccgctgcagctgcggcaagtgcttcggcagcaagttcagcttcagcctcatcgtccgcaagtgctgcggccgccgcaggtgcctctgccgccgctggtgcggcatcatcggcgtctgcaagcgccgccgcctccgcatttagcagcgcgttcatatctgctcttctaggtttctcacaatttaactcggtgttcggttctattacatccgctagcttgggattgggaatcgctgctaacgcagttcagtcaggactagcgtcactaggtctaggtgctgctgcatcagccgctgcctctgcagttgccaacgcgggcttaaatggctcaggtacgtcttc

SEQ ID NO: 663 - DNA, 557 bp, synthetic construct
  misc_feature 1..557: note = Description of Artificial Sequence: Synthetic polynucleotide
  source 1..557: mol_type = other DNA
gaagacttagcaggtgcttatgcttacgcgacggcaattgcttcagcgattggtaacgcactattaggtgcgggattcttgacagctggaaacgctagccagatagctgcttctgtagcaagtgctgtggcatcatcggcatcagccgccgctgcagcagccagttctagcgcggccgcagctggtgctagctctgctgctggagcagcttcatcctccagtacaaccactaccacatctacttcatcgtcggcagctgctgctgcagctgccgctgctgccgcatccgcttcaggtgcctcttctgcgagcgcagcggcttctgctagtgccgctgctagcgctttcagtagcgctttgatcggtgacttgttgggtataggtgtattcggaaataccttcggatctatcggtagcgcatccgctgcttcaagtattgcttctgctgctgctcaagctgcattgagcggacttggactgagttatcttgcttcagccggtgcctcagccgttgccagcgcagtcgccggagttggcgtgggagcaggtacgtcttc

SEQ ID NO: 664 - DNA, 779 bp, synthetic construct
  misc_feature 1..779: note = Description of Artificial Sequence: Synthetic polynucleotide
  source 1..779: mol_type = other DNA
gaagacttagcaggtgcgggcgctggagctggtgccggcgccggagccggagcaggcgctggttccggcgcttctactagcgtctcaactagcagtagttcaggtagcggtgcgggtgcaggagctggttctggtgctggttctggagcaggtgccggatctggtgctggagccggtgcaggtgcaggtggtgcaggcgctggtttcggatctggtctgggtctaggatacggcgtgggcttatcttctgcacaagcgcaagctcaggcccaagcagctgctcaagctcaagctcaagcacaagcacaggcttatgccgctgcacaggctcaagcacaggcccaagcccaagcgcaggctgcagcagctgcagctgctgccgctgctgctggtgcaggtgctggtgctggcgctggtgctggtgcaggtgccggtgccggttccggagcttcgaccagtgtaagcacatcttccagctccggctccggtgctggtgccggagcaggatcaggtgctggttcgggtgctggtgcgggatcaggtgctggagcaggagctggtgccggtggtgctggagctggattcggtagcggacttggacttggatatggtgttggcttaagctcagcacaagcacaagctcaagcccaagctgctgcacaggctcaggctcaagctcaggctcaagcctacgctgctgctcaagcccaagcacaagcccaagcccaggcccaagctgcagctgccgctgctgccgcggccgccgcaggtacgtcttc

SEQ ID NO: 665 - DNA, 779 bp, synthetic construct
  misc_feature 1..779: note = Description of Artificial Sequence: Synthetic polynucleotide
  source 1..779: mol_type = other DNA
gaagacttagcaggtgcaggtgcaggtgctggtgccggagcaggagcgggagctggagcaggttccggtgccagtacctctgtctcgacctcatcatcttctggaagtggtgctggagctggtgcgggatccggtgctggatctggtgcgggtgcaggaagcggtgctggtgctggcgccggtgcaggtggtgcaggagcagcttttggaagtggtttaggattgggttatggagttggattgtcctccgcacaggctcaggcgcaagcacaagcagctgcccaagctcaagctgatgctcaggcacaagcctacgcagccgcccaggctcaggctcaagctcaggcccaggctcaagctgctgcagctgccgccgcagctgctgctgctggcgctggagcaggtgcaggcgctggttccggagctggagcaggagctggatcgggcgcatctacctccgtctctacctcatcttcttcaggttctggagctggcgcaggagccggttctggagccggttcgggtgctggcgctggatccggagctggtgcaggagcaggtgctggaggagcgggtgccggtttcggaagtggacttggtcttggttacggagttggtctgagttctgctcaggcgcaagcccaagctcaagcagctgcacaagcgcaggctgacgcacaagctcaagcctatgccgctgctcaagcacaagcccaggcccaggcacaagctcaggcagccgcggccgccgctgctgcggcagccgcaggtacgtcttc

SEQ ID NO: 666 - DNA, 779 bp, synthetic construct
  misc_feature 1..779: note = Description of Artificial Sequence: Synthetic polynucleotide
  source 1..779: mol_type = other DNA
gaagacttagcaggtgctggagccggcgctggtgctggatctggagctggtgcaggagccggttcaggtgcctcaacaagtgtctctacaagttcttctagtggttcaggtgctggtgctggtgcaggatctggagccggatctggtgctggcgcgggtagtggagctggcgcaggagctggtgcgggtggcgccggagctggcttcggctccggtttgggacttggttacggcgtaggtctttcttctgcacaagctcaagcgcaatctgctgcagcagctagagctcaggccgacgctcaggcacaagcatacgctgctgcacaagcacaggcccaggcccaggcacaggcacaagccgccgcagctgctgccgctgctgctgctgcaggagctggagcgggcgctggtgccggagcaggagctggtgctggagcaggttcaggagcatcaactagcgtttccaccagttcctcatcagcttctggtgctggtgctggcgccggtagcggagcgggttctggagccggtgccggttccggagcaggtgcaggagccggagctggcggcgccggcgcaggttttggaagtggtttgggtcttggctacggtgtaggattaagctcagcccaggctcaagctcaagcacaagccgctgcccaggctcaggctcaagctcaggcacaagctctcgccgctgctcaagctcaagctcaggcgcaagctcaagcccaagctgccgctgccactgcagcggctgctgctgcaggtacgtcttc

SEQ ID NO: 667 - DNA, 605 bp, synthetic construct
  misc_feature 1..605: note = Description of Artificial Sequence: Synthetic polynucleotide
  source 1..605: mol_type = other DNA
gaagacttagcaggtcaaggaacggactctgtcgcaagcagcgcttcttcctctgctagtgcctcttcttcagccacgggaccagataccggatatcctgtaggttactatggtgctggacaagccgaagctgctgcttctgctgccgccgcagcagctgcttccgctgctgaggctgctacgattgccggtttgggttacggtagacagggacagggaactgattcatcagcctcttctgtttctaccagtaccagtgtcagttctttggcaacaggacctggttcgcgatatccagtgagggactatggagcagatcaagcagaggccgccgcatcagccgcagccgccgcttctgccgctgaggaaattgcttctttaggttatggtcgtcagggacaaggtacagatagtgtcgcttccagtgctagttcatctgcaagcgccagtagctcagccactggaccggatacaggttaccccgtaggttattacggagccggacaggccgaggctgctgcatcagctgcggctgccgctgccgccagtgccgctgaagccgctactatcgcaggtttgggatatggtagacaaggtacgtcttc

SEQ ID NO: 668 - DNA, 617 bp, synthetic construct
  misc_feature 1..617: note = Description of Artificial Sequence: Synthetic polynucleotide
  source 1..617: mol_type = other DNA
gaagacttagcaggtcagggaacagattcttcggcttcatcggtatccacctctacctctgtatcttcctctgctactggacctgatacaggttatcctgtcggatattacggcgctggacaggcagaagcagctgccagcgctgcagcggcagccgctgctagcgcagccgaagccgccacaattgccggacttggttacggcagacaaggtcagggaaccgacagctcggcctcttctgtatcaactagtacttcagtgagtagttcagctactggtccagatatgggttatccagtgggaaactatggagcaggacaagctgaagccgccgcttcagctgctgctgcagccgctgcatccgcagcagaggctgcgactattgcatctcttggatatggccgtcaaggacagggtactgattcatccgctagctcagtctctacaagtacctctgtctccagttctgcaactggtccaggttcacgttatcctgttagggattatggagctgaccaggccgaggctgctgctagtgccgcagcagcagcagctgctgcagcctctgctgcagaggaaatcgccagtctgggatacggtaggcaaggtacgtcttc

SEQ ID NO: 669 - DNA, 617 bp, synthetic construct
  misc_feature 1..617: note = Description of Artificial Sequence: Synthetic polynucleotide
  source 1..617: mol_type = other DNA
gaagacttagcaggtcagggcacagactccgttgcgagctcggcttcttcatctgcatctgcaagctcttcagcaacaggtcctgataccggttacccagttggatattatggagcgggtcaagcagaagctgcagctagtgccgcagcagccgccgctgcatccgctgctgaggcagccactattgcaggtttgggttacggacgacaaggacaaggtacagattctagtgcatctagtgttagtacctccacatctgttagctcttcagctacaggaccaggatccaggtatccagtcagagattatggagcagaccaagcagaggccgcagcctctgctaccgccgcagctgcagctgccgctagtgctgctgaagaaattgctagtcttggttatggacgccaaggacagggaacagacagtgttgcatcctctgcctcctcgtccgcttctgcatcatcgtcagccaccggtcctgatactggttatcctgtcggttactacggagctggtcaagccgaggctgcagcttcagccgcagcggcagctgctgcttcagccgctgaggccgccaccattgctggtctaggatatggtcgacaaggtacgtcttc

SEQ ID NO: 670 - DNA, 644 bp, synthetic construct
  misc_feature 1..644: note = Description of Artificial Sequence: Synthetic polynucleotide
  source 1..644: mol_type = other DNA
gaagacttagcaggtgtctccctatctagttctcaggctacatcggtggctagcgcaattagcagttccttgtatgcttttaactaccaagctagtgccgcttcatcagctgcggctcaatccagtgcccaaacagcaagtaccagtgctaagcagacggctgcgtcaacttctgcatccacagcggccaccagcacaacgcaaacagctgcaacaacctcagcctcaacagccgcatcgagtcaaacagtacagaaggcttctacatcaagtgccgcatccaccgcagcaagcaagagccaaagttcttctgccggctcttcaaggactacatctacagccgcagcctctgcaagcagctcttacgctttcgctcagtcgttatctcaatacttactgtcgtcgcagcagttcaccaccgcttttgcctcttccactgcagtggcatcctcccagcaatatgctgaggccatggctcaaagcgtggcaacgtcgttgggcttgggatacacttatgccagcgcactctcggttgccatggcccaagctatttctggagtcggtggtggtgcttctgcttactcatatgctacagccatttcacaggcaatatccagggctttgacatcttcaggtacgtcttc

SEQ ID NO: 671 - DNA, 641 bp, synthetic construct
  misc_feature 1..641: note = Description of Artificial Sequence: Synthetic polynucleotide
  source 1..641: mol_type = other DNA
gaagacttagcaggtgtctctctttcttcttcgcaagctacttctgtagcttctgcaatcagcagctcattatacgcatttaattatcaagcttctgccgctagttccgctgcagcccagagctctgcccagaccgcaagcacatcagctaagcagaccgcggctagtacgtcagcatccacggctgctacatctaccacccaaacggctgcgaccactagcgcttctactgctgcctctagtcagacagtccaaaaagcctccacgagttctgcagcaagtacagcagcgtcaaagagccaatcttcttctgtgggtagttccacaacctcgactgcagcagcttccgccagttcttcatacgcttttgctcagtctttgtcccaatatttgttgagttctcaacaatttacaacggcttttgcaagttccaccgctgttgctagttcacaacaatatgctgaagccatggcccagagtgttgctactagcttaggacttggatacacctacacttcggccctgagcgtcgctatggctcaagcaattagcggtgtcggcggaggagcctctgcttactcctacgccactgccatttcacaggcaatttcaagagttttaacttcttcaggtacgtcttc

SEQ ID NO: 672 - DNA, 641 bp, synthetic construct
  misc_feature 1..641: note = Description of Artificial Sequence: Synthetic polynucleotide
  source 1..641: mol_type = other DNA
gaagacttagcaggtatatccctgtcgtcaagtcaagctacttccgtggccagtgctataagttcttctctatacgcttttaactatcaggcttctgccgcttcatcggctgccgcacagtcatctgcgcaaacggcaagtacgtccgctaaacaaactgctgcttctacctctgcctctacagctgctacttcaacgacacaaacagctgccacaacctcggctagtacggctgctagttcgcagacagttcaaaaagcgtcaacttcttccgccgcctctaccgcagcatctaaatcacaatcttcctccgtgggttcaagcactacatctacagccgctgcgtcggcgtcctcttcgtatgcttttgcccaaagtttgtctcagtatctcttgtccagccaacaatttacaacagcttttgcaagctcaactgccgttgcttcatctcaacagtatgccgaagctatggctcagagtgtcgccacttcgttaggcttgggttacacttatacatccgctttgtccgtggcaatggcacaggccatatctggagttggtggtggagctagtgcttacagttatgctaccgccatttctcaggctatatcaagagtgctaacttcgtcaggtacgtcttc

SEQ ID NO: 673 - DNA, 566 bp, synthetic construct
  misc_feature 1..566: note = Description of Artificial Sequence: Synthetic polynucleotide
  source 1..566: mol_type = other DNA
gaagacttagcaggtagcagtgcatacgactctcaattcagtgagagctcatctgcctcgtctgctgcagccagtgccttctcggaacagacctcctacgacatatcctcggatctttcttccgcatcaagtgctactgccgcagccgcgtcgtcgtctgcatatgaatcacaattctctgatgcttcttccggttcatcggcagcagctgcggcaagtagtcaacagaattcatacgatactgacgccttgtattctgcttcatctgctgcctccgcagctgcttctgcaagtgcatacgaactagagttttcagatgcatcttcatcgtctagtgctgtcgcagttgcatcttcacaacagggctcatacgatacctcctcagacttttctagtgctagttccgctgctgccgccgcagcttctgcttatgagtctaagttcttggatgcttcttcatctagctcggctgccgctgcagcaagttctcaacaatcatcatatgagacgagttcagacctcgtatctgctagttcagctgccgctgctgcggcaggtacgtcttc

SEQ ID NO: 674 - DNA, 554 bp, synthetic construct
  misc_feature 1..554: note = Description of Artificial Sequence: Synthetic polynucleotide
  source 1..554: mol_type = other DNA
gaagacttagcaggtgcatcagcatatcagtcgcagttcttggatgcttcatcttcgtccaacgcagctgctaccacttcctcaagacaatccagttatgataccagttcagacttttcctcggcttcaatcgcagccgccgcagcggctagtgcctcatcatacgagagtcaattttcagatgcatccagttcctctaatgccgcagcggcagcctcgtcccaacaatcgtcttatgatacatcatctgatctggtttctgcagcttcggcgtctgcctacgaatcccagttcctagatgcttcctcaagtagtaatgccgccgctactacaagtagtcagcagtcctcctatgatacttcatcagatttctcttccgcttctattgctgctgctgccgctgcgagtgcttcatcgtacgagtcccaattctctgatgccagctcttcttccaacgccgccgctgcggcaagttcccaacagtctagctatgatacatccagcgatttggtgagcgctagttcagctgctgctgcagctgcaggtacgtcttc

SEQ ID NO: 675 - DNA, 707 bp, synthetic construct
  misc_feature 1..707: note = Description of Artificial Sequence: Synthetic polynucleotide
  source 1..707: mol_type = other DNA
gaagacttagcaggtgcttcatcttacgagtcacaattttccgacgcatcttctagtagtaacgccgccgcggcagcttcgtctcaacagtcatcatacgatacctcttctgacttagtctctgcttcttctgccgcagctgccgccgctagtgcttcagcttatgaaagccagttcagcgacgcttcttcatctcgaaatgctgccgcagctgcatcgtctcaacaaagctcctacgatacttcatccgacttggtatctgcatcatccgccgctgcagccgctgcctcagcaagctcttacgaatctcaatttttagatgcctcttcctcgtctaacgctgccgctaccacttcatctcagcaatcctcatatgacacgtcatcagattttagtagtgcttccattgcggctgctgtagccgcctctgccagctcttatgaatctcaattttccgatgcctcttcatcgagtaaagccgcagctgcagcaagttcccaacagagttcttacgatactagcagtgatttagtttccgccagtagtgcagctgcagcagccgcgagtgcttctagttacgaatcacagttttctgatgcgagttcgagttccaacgcagccgccgccgcatccagtcaacagtcatcctacgatacctcaagtgacttttccagtgctaattccgccgcactggcaggtacgtcttc

SEQ ID NO: 676 - DNA, 740 bp, synthetic construct
  misc_feature 1..740: note = Description of Artificial Sequence: Synthetic polynucleotide
  source 1..740: mol_type = other DNA
gaagacttagcaggtgctgcgcagaaacagccatcaggagagtctagtgttgccactgcaagcgcggctgcaacctcagtgacctcaggtggagcaccagttggaaagccaggtgtcccagcaccaatattttaccctcaaggtccgttacagcagggacctgcacctggaccttccaacgtccagcctggtacctctcagcaaggtccgatcggtggcgttggtggctcaaatgcgttttcgtcgtcattcgccagtgccttatccctaaaccgaggttttacagaagttatcagctctgcttccgcaacggctgttgcaagtgcttttcagaagggtctagctccatatggaactgccttcgctctgtcagcagcttccgcggctgctgatgcgtacaacagcattggatccggagctaatgcattcgcatatgctcaagcttttgctagagttctgtatccattggtcagacaatatggactatctagctctggtaaagcatctgcgttcgcctcagctattgcttcttctttctcttccggtacttctggacaaggaccgtccattggacagcaacaaccaccagtaactatttctgccgcctcggcctcagctggagcttcagctgcagccgtaggaggtggtcaagttggtcagggaccgtatggtggacaacaacaatccactgctgcctcagccagtgctgcagcagctactgccacatcaggtacgtcttc

SEQ ID NO: 677 - DNA, 740 bp, synthetic construct
  misc_feature 1..740: note = Description of Artificial Sequence: Synthetic polynucleotide
  source 1..740: mol_type = other DNA
gaagacttagcaggtgctgcccagaaacaacctagtggtgagagttccgtagctactgcatctgcagcggccacttcagtgacttcgggtggtgctcctgtaggaaaacctggtgtacctgccccaatattttacccacaaggtccgttgcaacagggcccagcaccgggtccatcgaacgtccaacctggaacatcccagcaaggtccaattggtggtgtgggaggctctaacgcgttctcctcttcctttgcaagcgctctgtctttaaaccgaggtttcactgaagtgatatctagtgcttctgcaacagcggtggcttcagcgttccaaaaaggattagccccttatggcaccgcctttgcattgagcgcggcctctgccgctgccgatgcctataatagtatcggcagtggagctaatgctttcgcctatgcgcaagcattcgctagagtcctttacccacttgtgaggcagtatggtttaagttcgtctggaaaagctagtgcttttgcgtcagcaattgccagttcattctcttcaggtacttcgggtcaaggaccttctattggacagcaacaacctcctgtcacaatttctgctgcctctgccagtgctggcgcttctgcagcagctgtgggcggcggtcaggttggtcagggcccatacggtggacaacagcagagtactgcagcctctgcttcagcagcggccgccacagcaacttcaggtacgtcttc

SEQ ID NO: 678 - DNA, 740 bp, synthetic construct
  misc_feature 1..740: note = Description of Artificial Sequence: Synthetic polynucleotide
  source 1..740: mol_type = other DNA
gaagacttagcaggtgctgctcagaagcaaccatcgggagaaagttccgtagcgactgccagtgcggctgcaacatctgtgacttccggtggtgctcctgtaggtaagccaggagtgcctgcacctatcttctatccacaaggtccactacaacagggtcctgctccgggaccatctaatgtgcaaccaggtacgtcccaacagggacctattggtggtgtgggaggaagcaacgctttttcttcctcatttgcatcggctctttccctaaaccgcggatttactgaggtcatttcttccgcttctgctactgcagtggcctctgcttttcagaaaggtcttgccccatatggcactgctttcgcgctctcagcggcttcggctgcagctgatgcttataattccattggtagtggagctaacgcttttgcatacgctcaggcatttgccagggtattatacccattggttcagcaatatggtctttcttcaagtgctaaggcttcagcttttgcttctgcaatcgcatctagcttttctagcggtacatctggacagggaccaagtattggacaacaacagccaccggttacgatttctgctgccagcgcttcagcaggtgccagcgcagccgcagtcggaggtggtcaggtcggtcaaggcccgtatggtggtcaacagcaatcaacagctgcatcagcatctgccgcagctgccactgctacctcaggtacgtcttc

SEQ ID NO: 679 - DNA, 740 bp, synthetic construct
  misc_feature 1..740: note = Description of Artificial Sequence: Synthetic polynucleotide
  source 1..740: mol_type = other DNA
gaagacttagcaggtggtgctcaaaagcaaccatcaggtgaaagttctgtagctactgcttcggctgcagctactagcgttacctcagcaggtgctcctgtaggcaagccgggagtacctgcaccaattttttacccacaaggtcctctacaacagggtccagctcctggtccctcgaacgtccagccaggtacaagtcaacaaggtccaattggtggtgtgggtggaagtaatgccttcagtagcagtttcgcctcagccctctcattgaacagaggattcaccgaagtgatcagtagtgcctccgccaccgctgtggcatctgcttttcaaaaaggtctagctccttacggtacagcatttgctttatctgctgcctccgctgcagccgatgcctataatagcatcggatctggagctaacgcttttgcctatgctcaggccttcgccagagtattatacccattagtacaacaatacggactttcttcgagtgctaaggctagtgctttcgcatctgcaattgcatcatcatttagttcaggaacttctggtcagggtccatctaacggtcaacaacagcctccagttaccatatctgcagcatcagcttcagctggtgcctcagcagctgctgtcggaggaggtcaggtttctcaaggaccatatggtggacaacagcaatccacagctgcctctgcaagtgccgctgctgctaccgcaacttcaggtacgtcttc

SEQ ID NO: 680 - DNA, 740 bp, synthetic construct
  misc_feature 1..740: note = Description of Artificial Sequence: Synthetic polynucleotide
  source 1..740: mol_type = other DNA
gaagacttagcaggtggtgcacagaaacaaccttctggtgaaagttccgtcgctactgctagcgctgccgcaacttcggttacgtctgctggagctcctggcggtaagccgggtgtaccggctcctattttctatcctcaaggtccgctgcaacagggaccagcgccaggaccttctaatgtgcaaccgggaacctctcaacaaggaccaatcggaggcgtaggtggaagtaatgctttttcttcttcattcgcctctgctctttctctcaaccgtggttttacagaggtaatatcatccgctagcgctaccgcagtggcaagtgcttttcaaaagggtcttgctccatatggaactgcttttgccttgtctgctgctagtgcggctgctgatgcttacaactccataggctcaggagccaatgcttttgcttacgctcaagcatttgctcgtgtattgtatcctctggtacagcaatacggactttcatcatccgcaaaggcctcagcctttgcctcagctatagcatcttcgttctctagtggtactagcggccaaggaccttcgattggccaacaacagccaccagtcactatttcagcagccagtgcttcagctggagcatctgctgcagcagtcggtggcggtcaagtaggtcagggaccatacggaggtcagcaacaatcaaccgctgcttccgcttctgctgcggcggcaacagcaacctcaggtacgtcttc

SEQ ID NO: 681 - DNA, 749 bp, synthetic construct
  misc_feature 1..749: note = Description of Artificial Sequence: Synthetic polynucleotide
  source 1..749: mol_type = other DNA
gaagacttagcaggtggcgcacagaagcagccttcaggtgagagttccgtcgcaactgcttcagctgctgcaacatcagttacctctgccggtgctccagtgggaaaaccgggtgtacctgcacctattttttacccacagggtccactccaacaaggaccagcacctggaccttcatacgtgcagccagctactagccagcagggtcctattggtggagccggacgttctaacgcgttttcctcatcattcgccagtgctctgtcaggaaatagaggtttttctgaagttatctcttctgcgtccgcaacagccgtcgcatcggcttttcaaaagggtttggctccctatggtaccgcatttgcattaagtgcagcttcggctgccgccgacgcatacaacagtattggaagcggcgccaatgctttcgcatacgcgcaagcttttgccagagtgttgtaccctttggtacaacaatatggtttgtccagcagtgctaaagcatctgctttcgctagtgcaatcgcatcatcattttcttcgggcgccgcaggacagggtcagtcaattccgtatggaggacagcaacaaccacccatgaccatttcagccgcttctgcatctgcaggtgcttccgctgcagcagttaaaggaggtcaggttggacaaggtccatacggaggtcaacaacaatcaacggctgcatcggctagtgccgctgcaacgactgccacagcaggtacgtcttc

SEQ ID NO: 682 - DNA, 758 bp, synthetic construct
  misc_feature 1..758: note = Description of Artificial Sequence: Synthetic polynucleotide
  source 1..758: mol_type = other DNA
gaagacttagcaggtggtgcacaaaaacatccatccggtgaatactccgtggcaacagcaagcgctgctgccacctccgtaacatctggaggtgcacccgtgggcaaaccaggtgtccctgcaccaatcttctatccacaaggacctttgcagcaaggtccagctcctggtccatcgaacgttcaacctggtacgtcacaacaaggtcctatcggaggtgtcggagaatctaacacgttctctagttcatttgctagtgcattgggaggaaacagaggtttttcgggtgtaatttcttccgcatctgccaccgcagtagctagcgcctttcaaaaaggcttggcgccttatggtaccgctttcgccctttctgcagcatcggcggccgctgatgcatataacagcatcggttccggcgcatctgcatcagcttacgctcaggcctttgctcgagtgttgtacccattgttacagcaatatggactatcatctagtgccgacgctagcgctttcgcatctgctatagcctcctcattctcaactggtgtagctggccagggtccgtctgttccttatgtaggacagcagcagccttctataatggttagtgctgcaagtgcttcagctgctgcatctgccgctgcggtaggtggaggtcccgtggttcaaggcccatacgacggcggtcaaccacaacaacctaatattgctgctagtgctgctgctgccgccaccgcaacatcctcaggtacgtcttc

SEQ ID NO: 683 - DNA, 605 bp, synthetic construct
  misc_feature 1..605: note = Description of Artificial Sequence: Synthetic polynucleotide
  source 1..605: mol_type = other DNA
gaagacttagcaggttccttgggttaccagttagcattgcaaacagctaactcattgggaatccaaaatgctgcttcactggcctctgctgtggctcaagccgtgagcgccgtaggtgtcagggcaagctcatatgcctatgcaagcgccatttccaacaccgttggtcaattcttaaccagccaaggattgctttcgcaatcgaacgcatctgccttggcatccagttttgcctccgcctttgctgcatctgccgcttcagcaagcgcctctgccagtagttcttcttacgcccaatcatcggccgccgctcaatcgcagtctgcagcgagtgctttcacccgcgcagcatctgcagctgcaagccaagctagttctcagtctgcatcacaagccggttcgtatggaagaacaactacaacttctacttcgcaaagtggagcacaagcaggatcacaggccgcttcacaagcttcctctagtagctgggctgctgcttcggcctcagcgttcgcccagtcatctgcatcgtcgctcgcctcatcctcagccttctcctctgctttctcatctgcaagttcagcttctgcagtaggtacgtcttc

SEQ ID NO: 684 - DNA, 605 bp, synthetic construct
  misc_feature 1..605: note = Description of Artificial Sequence: Synthetic polynucleotide
  source 1..605: mol_type = other DNA
gaagacttagcaggttcgttgtgttaccaactcgcgctgcagacagccaactctcttggtatacagaatgcagcctcgctagctagtgctgtctcacaggctgtttcagccgtcggcgttagagcttctagttatgcttatgcgagtgctattagtaatactgttggtcagtttttgatcagtcaaggtttattgagccagtctaatgctagtgcgttagcaagctcttttgcctctgcttttgcagctagcgcagcgtcggcctccgcttcagcctcgagttcatcctatgctcaatcctctgctgccgcacaatcccaaagtgcggcctcagccttcagcagagctgctagtgcagccgcgtctcaagctagtagccaatccgcctctcaagctggaagttatggacgcactactaccacttctacctccgaatctggcgcccaagccgcttctcaagctgcgagccaagcttcctcttcttcatgggcggccgcaagtgccagtgcctttgctcaatcttcagcttcctctctagcgtctagtagcgcgttcgcttcagcattttcttctgcaagttcaacgtctgcagtaggtacgtcttc

SEQ ID NO: 685 - DNA, 569 bp, synthetic construct
  misc_feature 1..569: note = Description of Artificial Sequence: Synthetic polynucleotide
  source 1..569: mol_type = other DNA
gaagacttagcaggtaacgtgggctatcaattaggacttaaggtagcaaactcactgggccttggaaatgctcaggccctggcatccagtctctcacaagctgtttccgctgtgggtgtcggtgcatcttcgaatgcttatgctaatgcagtcagtaacgccgttggtcaagtcctggctggtcagggaatcttgaacgcagcaaatgccggaagcttggcttcatcgtttgcctcagctttgtctagttctgctgcttctgtcgcaagccaatctgcttcgcaatctcaagctgcaagtcaatcccaagctgcagctagtgcattcagacaggccgcatcacaatccgcctctcaatcggcaagtagagctggaagtcagtcatctacaaagactacttctacgtccacctcaggttcacaagcagatagccgatcggcatcttcttcagcatcacaagcttcagcctctgccttcgctcagcagtctagcgctagcctgtctagctcctcctcatttagttcggctttctcctcagcaacatcaatatccgcagtaggtacgtcttc

SEQ ID NO: 686 - DNA, 569 bp, synthetic construct
  misc_feature 1..569: note = Description of Artificial Sequence: Synthetic polynucleotide
  source 1..569: mol_type = other DNA
gaagacttagcaggtaatgttggttaccagttgggacttaaagttgctaattcgcttggtttgggaaacgctcaggctttagcttctagtttgagtcaagcagtttccgctgtgggagttggagcttcttcaaatgcttacgctaatgcagttagtaatgctgttggacaagtactggccggccaaggaattttgaacgctgcaaatgccggttctttggcctctagctttgctagcgctctctcttccagcgcagcttccgtcgcaagccaatctgccagccaatctcaggcggctagtcagagtcaggctgccgcttccgcttttagacaggctgcttctcaatctgcatctcaatccgactccagagctggatcacaaagtagcactaaaactacatcgactagtacgtctggctctcaggcagattcaagatcagcttcatcctcagccagccaagcgtcggcctcagccttcgcccaacagagtagcgcgagtctatctagttcttcctcattttcttcagctttcagttctgctacttcgatatccgctgtaggtacgtcttc

SEQ ID NO: 687 - DNA, 569 bp, synthetic construct
  misc_feature 1..569: note = Description of Artificial Sequence: Synthetic polynucleotide
  source 1..569: mol_type = other DNA
gaagacttagcaggtaacgtcggttaccaacttggtcttaaggtggctaactcactaggacttggaaatgctcaagcattggctagctctctgtctcaagccgttagtgctgttggagtgggcgcttccagtaatgcttacgctaacgctgtgtcaaatgcagttggtcaagtcctagcaggtcaaggaattctaaacgccgctaatgccggctctctcgcttcttctttcgctagcgctttgagttcaagtgctgcttccgttgcttcacaatcggcctctcaatcacaagcggcttcgcaatctcaagcggctgcctctgcattcagacaggcggcaagtcaatctgcttcccagtcggcctcccgtgcaggttctcaatcatccacaaagactaccagcacgtccactagtggtagccaagccgattcccgctctgcttcaagtagtgctagtcaggccagcgcgtcagccttcgctcaacaatctagtgcatctctaagttcgtcatcgtctttctctagcgcattcagcagcgctacatctataagtgcagtaggtacgtcttc

SEQ ID NO: 688 - DNA, 551 bp, synthetic construct
  misc_feature 1..551: note = Description of Artificial Sequence: Synthetic polynucleotide
  source 1..551: mol_type = other DNA
gaagacttagcaggttcacaagccgcctctcagtcggcaagctcttctgcatcccaagcttcggcctcttcttttgctcaggcatcatccgcatctttggcagcctcttcctctttttcatcagccttttcctcagcaacttctctcagtgctcttggcaatgttgcttaccagttgggttttaacgtaggaacaaacttaggcttaacgaatgctgctggcttggctgcagccatctcacaggcagcatcctctgtaggtgtgggagcctcatctggtgcctatgctaatgctttgtcaaatgccgccgcccaatttttgagtgctcaaggtattttaaacacggtcaatgctggatcattagctagcagttttgcatcagcattgtcgtcagtagctgcctctgctgcagctcaagcaagttcacaaagccaagctgcaagtagtgcattttctagagctgcgagccagtcagcatcccagtcagccgcaagatcaggtgctcagagtagctcctctactaccacaacctctacatcaggtacgtcttc

SEQ ID NO: 689 - DNA, 551 bp, synthetic construct
  misc_feature 1..551: note = Description of Artificial Sequence: Synthetic polynucleotide
  source 1..551: mol_type = other DNA
gaagacttagcaggttcacaagctgcaagtcagtccgctagtagctcggctagtcaggcttctgctagctcttttgcacaggcttcctccgcttcccttgcagccagttcatcttttagtagtgctttttcaagtgcaacatccttaagtgccttgggcaatgttgcttatcaactgggtttcgacgtcggtacaaacctaggtttgacaaatgcagccggtctagctgctgccttctctcaagctgcctcctcagtaggtgttggtggttcatctggagcttatgccaacgctttgtcgaatgccgcggcacaatttttgtcggctcaaggtatcttaaacacggtcaatgctggttctttagcctcttcttttgcatccgctctttcgtcagtcgcagcatctgctgctgcccaggccagttcacaatctcaagcagcttccagcgcgttctcacgagcagcaagtcaatcagcttcacagagtgctgccaggtctggagctcaatcttccagtagtacaacaactacttcctcctcaggtacgtcttc

SEQ ID NO: 690 - DNA, 563 bp, synthetic construct
  misc_feature 1..563: note = Description of Artificial Sequence: Synthetic polynucleotide
  source 1..563: mol_type = other DNA
gaagacttagcaggtaatgttgcctatcagcttggatttaatgttgccaacaccttgggattaggtaacgctgcaggattaggtgccgcattgtcacaggctgtatcttcggtgggtgtaggagcctcttcaggtacttatgccaatgctgtttcaaatgctgtgggacaatttctcgccggtcaaggcattttgaacgctgcaaacgctgcgagccttgccagttcttttgctagtgctctaagtgcttcagccgcttctgttgctagctcgagcgcagctcaatcagcgagtcaatcccaagccgctgcatcggccttctccagagcagcatctcaatcggcttctcagtcggcagccctttctggtgcacagagctcatcgacaacaacgacaacatctacaagtggctcgcaggccgcctcacagagcgcatcatctagtgcaagtcaagcgtccgcttcgtccttcgcacaagctagttcggcttcactcgcagcttcgtcatccttttccagtgctttctcgtctgctaacaccttgtctgcattaggtacgtcttc

SEQ ID NO: 691 - DNA, 563 bp, synthetic construct
  misc_feature 1..563: note = Description of Artificial Sequence: Synthetic polynucleotide
  source 1..563: mol_type = other DNA
gaagacttagcaggtaacgtcgcctatcaattgggtttcaacgttgcaaatacattgggacttggaaacaccgcaggcctgggtgctgctctgtcacaagcagttagtagtgtcggtgtcggagccagttccgctacctacgcgaacgcagtttctaatgccgttggtcagtttttggctggtcagggtatcctaaatggcgctaatgctgcatcattggctagtagctttgccagcgccttgtctgctagcgcagcttctgtagcttcgtcgtctgccgcccaatctgcaacccaaagtcaagctgccgcttcggccttttccagagctgcttcacaatccgcttctcaatccgcagcaaggagcggcgctcaaagtagttccactacaaccactagctcaaccagcggatctcaggcagcttcacagtccgcatcgagttctgctagtcaggcttccgcttcgtctttcgctcaggctagtagtgctagtctggctgcgtcaagttccttttcttctgctttcagttcggccaatacactgagcgcactaggtacgtcttc

SEQ ID NO: 692 - DNA, 563 bp, synthetic construct
  misc_feature 1..563: note = Description of Artificial Sequence: Synthetic polynucleotide
  source 1..563: mol_type = other DNA
gaagacttagcaggtaacgtggcttatcaacttggtttcaacgtcgcaaacacacttggacttggaaatgctagcggattgggtgcagctttgagccaagccgtttctagtgttggtgtgggtgcatcttctggtacttatgcgaatgctgtttcaaatgctgtgggccagttcctggcaggccagggtattttgaatggtgctaatgctgcttctttggcttcttcattcgcttcagcattgagtgcttcagccgctagtgtagcttcatcatctgctgcgcaatcagcatcacagtctcaagctgccgcatcagcattttccagggctgcatctcaatctgcatcccagtcggcagccaggagcggtgctcaatccagcagtacgaccacaacttcttccacgagtggtagtcaagccgcttcccaatccgcatcatcctcggctagccaggccagtgcttcctcctttgctcaagcctcctctgcctccttagccgcttcaagtagtttttcgagtgtgttttccagtgcaaacacgttgagcgctctaggtacgtcttc

SEQ ID NO: 693 - DNA, 563 bp, synthetic construct
  misc_feature 1..563: note = Description of Artificial Sequence: Synthetic polynucleotide
  source 1..563: mol_type = other DNA
gaagacttagcaggttcattagcatcttcattcgctagcgcattatcggcatccgcagcatccgtcgcaagttctgcagcagctcaggctgcaagtcagtctcaagccgcagcctctgcattctctagggctgcctcccaatcagcttctcagtctgcagcaagatctggcgctcaatcatcctcgaccactaccacaaccagtaccgctggatctcaagctgcttctcaatttgcatcctccgctgcatcacaagcctcagcatcgtctttcgcacgagcttcctccgcctcattagcagcaagcagcagcttttcgagcgctttcagctccgcaaattccctatcagctttgggaaacgtaggttatcagctgggctttaacgtcgctaacaatcttggtataggaaatgcagctggtcttggaaacgcactgtcacaagccgtgagtagtgtcggcgtcggagcgtccagttcctcatacgccaatgctgtcagtaatgctgttggtcagttgttagccggacagggcattctaaatgccgctaacgcaggtacgtcttc

SEQ ID NO: 694 - DNA, 563 bp, synthetic construct
  misc_feature 1..563: note = Description of Artificial Sequence: Synthetic polynucleotide
  source 1..563: mol_type = other DNA
gaagacttagcaggttcattggcatcttcattcgcttccgccttatctgcttctgcagcctcggttgcaagttcagccgccgcccaagccgcatcacagagtcaggccgcagcatcagctttcagcagggctgctagtcaatctgccagtcaaagcgcagccagatctggcgcacaatcaatttccacgacaaccactacatcaactgccggcagtcaagcagccagtcagtctgcatcatcagcagcttcccaagctagtgcctcatcattcgcgcgagcatctagcgcatcactagctgcatcgtcatcattctctagtgccttcagtagcgctaactctctatcagctctgggtaatgtaggctatcagttgggattcaatgttgccaacaatcttggtatcggtaatgcagcaggtctaggaaacgcattatctcaggccgtcagcagtgttggagtaggtgcctcttcttctacgtatgcaaatgctgttagcaatgctgttggacaattcttggcaggacaaggcattttgaacgcagctaatgcaggtacgtcttc

SEQ ID NO: 695 - DNA, 563 bp, synthetic construct
  misc_feature 1..563: note = Description of Artificial Sequence: Synthetic polynucleotide
  source 1..563: mol_type = other DNA
gaagacttagcaggtagtctggctagctcctttgctagtgctttatctgcgtcggccgcatcagtggcctcatccgcagcagcacaggctgcttctcaaagtcaggccgcggcatccgcattttcacgtgctgcgtctcaatctgcatcacagtccgcagcaaggtcgggagcacaaagtagttcaacaactaccacaacttctaccgctggttcgcaggccgcatcccaattcgcatcttcagctgctagccaagcctctgctagttcattcgcgagggcatcatcggcctcactggctgcatcatcttcgttctcttctgcattttcttccgcaaattcactgtcggctctgggtaacgtcggttaccaattgggcttcaatgtagctaataacttgggaatctcaaatgccgcaggattgggtaacgctttatcacaggccgtttcttccgtcggagtaggcgctagttcttcctcttatgccaacgcagtttccaatgcagtgggtcagtttttggctggacaaggtatcttaaacgcagctaacgcaggtacgtcttc

SEQ ID NO: 696 - DNA, 563 bp, synthetic construct
  misc_feature 1..563: note = Description of Artificial Sequence: Synthetic polynucleotide
  source 1..563: mol_type = other DNA
gaagacttagcaggttccctagcatcatcttttgcttctgccctgtctgcttctgctgcttcagttgcttcatctgcggccgcacaagcggccagccaaagccaggcagctgctagtgctttttctagagctgcttcacaatccgcttctcagtctgccgcgagatcaggcgcccaatccttttcaacaactacaacgacttcaaccgctggatcacaagcagcttctcaatcggccagtagcgcagctagtcaagcctctgcatcctcctttgctagagcatcgagtgcttcattggctgcatcaagcgcattctcttcggcattctcgtccgctaattctttaagtgccttgggaaatgtggcataccagctaggtttcaatgttgccaatacactgggaatcggaaatgccgcaggtcttggcaatgctctgagccaagctgtttccagtgtaggcgttggcgcatcttccagcacctacgctaatgctgtctccaacgctgtgggccaattcttagccggccaaggagtactgaacgcgggtaacgcaggtacgtcttc

SEQ ID NO: 697 - DNA, 563 bp, synthetic construct
  misc_feature 1..563: note = Description of Artificial Sequence: Synthetic polynucleotide
  source 1..563: mol_type = other DNA
gaagacttagcaggtaacgttggttatcaattaggtttcaatgtggccaatacgctcggaattggaaacgctccaggattaggtaacgctttgtctcaagcagcctcctctgtaggtgttggagctagttccagtgcttacgctaacgctgtatctaatgctgtgggccaattccttgcgggtcaaggagttttaaatgcaggaaacgcaggtagtctggcttcttcatttgctaacgctctaagcgcttccgcggcaagtgtcgcatcaagcgcagcagcccaaagtgcatttcaaagtcaagctgccgcaagcgctttttctcgagctgcttcacaaagtgcttctcgtggtgcggctcgttctggagctcaatcttcttcaactacaacaactaccagtacgtcaggttcacaggccgcttcacaatctgcatcctcagctgccgcccaagctagtgcatcctccttcgctcaagcctcgtctgcttccttggcagccagttcagcattctcctctgcatttagttctgcaaatagtctgagtgctctaggtacgtcttc

SEQ ID NO: 698 - DNA, 563 bp, synthetic construct
  misc_feature 1..563: note = Description of Artificial Sequence: Synthetic polynucleotide
  source 1..563: mol_type = other DNA
gaagacttagcaggtaatgttggttatcagttgggcttcaatgtcgctaacacgctcggaataggtaacgcaccaggacttggaaacgccttatcccaagcggtatctagtgtaggtgttggtgctagtagttccgcctatgctaatgctgttagtaatgccgtgggacagtttttggccggacaaggagttttgaatatcggtaatgctggttcgttggcctcttcattcgccaatgctctgtctgcaagcgctgcttccgttgcaagctcagctgcagcccagtcagcctctcagagccaggcagctgcaagtgcattctccagagccgcatcacaatctgcttcgcgaggagcagcacgttcgggagctcaaagcagttccacaactacaacaacttctacatccggttcgcaagctgcttcccaaagcgcatcaagtgctgccgcccaggcctccgcgtccagttttgctcaagccagctcggcttcactcgctgcctctagcgctttttcctctgcctttagcagcgcaaactcactcagtgcgttaggtacgtcttc

SEQ ID NO: 699 - DNA, 563 bp, synthetic construct
  misc_feature 1..563: note = Description of Artificial Sequence: Synthetic polynucleotide
  source 1..563: mol_type = other DNA
gaagacttagcaggtaacgtcggataccaactaggtttcaatgtggctaataccttaggaatcggaaacgccccaggattgggaaacgctttgagtcaggctgtttcatctgttggagttggtgcatcatcatctgcctatgctaacgcagtcagcaatgctgtaggacagtttttagctggccagggagttcttaatattggaaacgcaggtagtctggcatcatcgtttgccaatgccttgtctgcatctgccgcctctgtggcttcttccgctgccgcacaaagcgcttcacaatcccaagccgccgcgtcggccttctcaagagccgccagtcaatccgcttctagaggtgctgcaagatcaggtgcccaatcttcgtcaactactactaccacttccactagtggatcacaggcagctagtcaatcagcatcgtcggctgctgcacaagccagcgcttcgtctttcgcccaagctagctccgcttctctcgcagcctcatccgctttttcgtctgcattctcttcagcaaattctttgtcggcactaggtacgtcttc

SEQ ID NO: 700 - DNA, 563 bp, synthetic construct
  misc_feature 1..563: note = Description of Artificial Sequence: Synthetic polynucleotide
  source 1..563: mol_type = other DNA
gaagacttagcaggtaatgtcggctaccagttaggattcaatgttgctaacacattgggtatcggaaacgcacctggtttaggaaatgcattatctcaagcagtttcgagtgttggagtgggagctagctcaagagcttacgctaatgcagtttctaacgcagtgggacaattccttgctggacagggagtcttgaatgtcggcaacgctggctccttggcttcatcgtttgcaaatgctctttcggccagtgcagcttctgtggccagtagcgctgctgctcaatcggcttctcaatcacaggcagccgcctcagctttctcgagagctgcttcccaatcagcttccagaggagctgctagaagtggtgcacagtctagttcaacaactactacaacgagtacatctggctcacaagccgcctctcagtccgcttcctccgctgccgctcaggctagtgcttcatcatttgcacaggcgtcctctgcttctctggctgcgtcctcagccttctcatccgctttttcatccgcaaattctttgtcagctttaggtacgtcttc

SEQ ID NO: 701 - DNA, 563 bp, synthetic construct
  misc_feature 1..563: note = Description of Artificial Sequence: Synthetic polynucleotide
  source 1..563: mol_type = other DNA
gaagacttagcaggtaacgtgggctatcagcttggttttaacgtcgctaacacattaggaataggtaacgcgccaagtttgggaaacgcactgtcacaagctgtctcttctgtaggagttggagcttcctcttcagcatacgctaacgcagtttccaacgctgtcggtcagtttctagctggtcaaggtgttttgaatgctggaaatgctggttctttggcctctagttttgctaatgcactgtcggcttcagccgcctctgttgcatccagcgctgctgcccagtcggcatttcagtcccaagccgccgcctcggctttttccagagcagcaagtcagtccgccagtcaatccgccgctcgttctggagctcaaagttcttcaacgaccacgactaccagtacatccggatcccaagcagcttctcaatctgcaagttcggctgccgcacaagctagtgccagcagtttcgcacaagcatcgtctgcctctctagcagcgagctcagcattctcctccgcttttagttcggcaaacagtttaagtgcattaggtacgtcttc

SEQ ID NO: 702 - DNA, 563 bp, synthetic construct
  misc_feature 1..563: note = Description of Artificial Sequence: Synthetic polynucleotide
  source 1..563: mol_type = other DNA
gaagacttagcaggtaatgtgggttatcagctaggttttaatgttgctaacacattaggtattggaaacgcaccaggacttggtaatgctttgtcacaagcagtatcttccgttggagtaggtgcatcttcatctgcttatgctaacgctgtgagtaatgctgtaggtcagttcttggccggacaaggtgtattgaatattggtaacgcaggttcgttagcctcatcctttgcgaatgctttatcagcttctgccgcatctgttgcttctagcgcagcagcacaatctgcctcccaatcccaggctgcagcttcggcattttcaagagcagcctcccagagtgcttctcgaggtgctgctagatccggagcccaatcttctagcacgactactaccacaagtacttcaggaagccaagcagcctcacaaagtgcctcgagcgccgccgctcaagcatctgcatcttcctttgctcaagcttcgtcagcctcactagctgcttcatccgcattctcatctgccttcagttcagccaatagtttgagcgctctaggtacgtcttc

SEQ ID NO: 703 - DNA, 563 bp, synthetic construct
  misc_feature 1..563: note = Description of Artificial Sequence: Synthetic polynucleotide
  source 1..563: mol_type = other DNA
gaagacttagcaggtaacgttggttaccagttgggattcaatgttgctaacactttgggtatcggaaacgctccaggactaggaaacgctttgtcacaggccgtctcttcagtaggagtcggtgcgtcctcatctgcttacgcaaatgcagtctcaaacgcagtcggacaattcttggctggtcaaggagttcttaacgccggtaatgcaggaagtctcgccagttctttcgccaatgccttatcagctagtgctgcaagcgtcgcaagtagcgcagctgcccaatcggctttccaatcacaagccgcggcaagtgcattctctagagcggcctcacagtcagccagtcagtctgctgctcgctcgggtgctcaatcttcttctactactacaaccacgtctacttccggtagtcaagcggccagccagtctgcttcgtctgcagctgctcaggcgagtgctagtagttttgcccaagcgagtagcgcttcgttagccgcatcttctgcctttagcagtgctttctcctcagcgaactccctttcagctctaggtacgtcttc

SEQ ID NO: 704 - DNA, 563 bp, synthetic construct
  misc_feature 1..563: note = Description of Artificial Sequence: Synthetic polynucleotide
  source 1..563: mol_type = other DNA
gaagacttagcaggtaacgttggttatcaattgggttttaatgtggcaaacacactcggcataggaaacgctccaggtttgggaaatgcattatctcaggccgtatcttccgttggtgtgggtgcatcctccagtgcatacgctaatgctgtctctaacgcagtaggtcagttcctggctggtcagggtgtcttaaacattggtaatgcaggttcattggcttcctcgttcgccaacgccttgtcagctagcgccgctagtgtcgcgtccagtgctgctgcccaaagcgcatcacaatcacaggcggctgcatccgctttctcaagggcagcttctcagtctgcatctagaggtgctgcacgttctggtgcacaatcctcttccacaacaacaactactagtacatccggatcccaagctgcttcacaatccgcatcttcagccgccgcccaagcatcagcttcttcctttgcccaagctagtagcgcttctttagctgcgtcgtctgcttttagttcggctttcagcagtgcgaattctttatctgcactaggtacgtcttc

SEQ ID NO: 705 - DNA, 563 bp, synthetic construct
  misc_feature 1..563: note = Description of Artificial Sequence: Synthetic polynucleotide
  source 1..563: mol_type = other DNA
gaagacttagcaggtaatgtaggataccaattaggtttcaacgtcgctaatacgctaggtattggtaacgctccaggcttgggaaacgccctgtcccaagccgtttcttcggtaggagtaggagcctcatctagagcatacgcaaacgccgtaagtaatgcagttggtcagttcttggccggtcaaggtgttctgaatgccggaaacgcaggaagtctcgcttcgagtttcgccaatgctttgtctgcctctgctgcctctgttgcgagttcagctgcagcccagtctgccagccaatctcaagctgcagcttccgcctttagcagagctgcatcacagtcagcatcccaatccgcagccagatcaggtgctcaaagctccagtaccactacgactacttcagcctccggatctcaagccgcatctcagagcgccagtagcgctgccgcgcaagctagcgcctcttcatttgctcaggcctcaagtgcctcccttgccgctagctcggccttttcttctgctttttcaagtgctaactcgctgtctgcgttaggtacgtcttc

SEQ ID NO: 706 - DNA, 563 bp, synthetic construct
  misc_feature 1..563: note = Description of Artificial Sequence: Synthetic polynucleotide
  source 1..563: mol_type = other DNA
gaagacttagcaggtaacgttggttaccaattgggtttcaacgttgctaacaccctgggtataggaaacgctcctggtcttggtaatgctctctcccaagctgtatcgtcggtcggagtaggagcttcatcaagtgcctatgcaaatgcagtctcaaatgctgtcggacaattcttggcaggtcagggcgttcttaatgcaggtaatgccggatcgttggccagcagcttcgctaacgctctttccgcttcggccgcttctgtggcatcctctgccgctgcacaaagtgcctttcaatcacaagcggccgctagtgcatttagtcgagctgcttctcagagtgcgagtcagtcagctgcaagaagtggtgctcagtcatcttctactactacaactacgtctacttcaggctctcaagctgcctctcagtccgcatcgtctgctgccgctcaagcatcagcgagtagctttgcgcaagcatcatccgcgtcacttgctgcctcaagtgcttttagtagtgccttctcttccgctaattcattgtccgccttaggtacgtcttc

SEQ ID NO: 707 - DNA, 563 bp, synthetic construct
  misc_feature 1..563: note = Description of Artificial Sequence: Synthetic polynucleotide
  source 1..563: mol_type = other DNA
gaagacttagcaggtagtcttgctagctcttttgcatccgctctttcagcttcagctgcatcagtggcaagttctgccgctgctcagagtgcttctcaaagtcaagctgccgcttcagccttcagcagggctgcttcacaatcagcctcacaaagcgcagcaagatcaggtgcccaatctagtagtaccaccacgactacatctgcttccggttcacaagcagcttcgcagtctgcttccagtgccgcaagtcaagcaagtgcctcgtcattcgctcaagcgagctctgcttcgttagctgcttcatctagcttttctagcgctttttcatcagctaattcgttgtccgctctgggaaatgttgcttaccagctgggatttaatgttgctaacacacttggaattggaaatgctccgggactgggcgcagccttatctcaagcggtttccagcgttggtgtgggtgctagtagcagtacctatgcaaacgtggtcagcaatgctgttggtcaattccttgctggacagggagttctgaacgctgctaatgcaggtacgtcttc

SEQ ID NO: 708 - DNA, 563 bp, synthetic construct
  misc_feature 1..563: note = Description of Artificial Sequence: Synthetic polynucleotide
  source 1..563: mol_type = other DNA
gaagacttagcaggtagcttggcaagctctttcgcctcagctctgtccgcatccgctgcttcagtcgctagctcagcagctgcacagagtgcttctcaaagtcaagctgcagcctctgccttcagtagagccgcttcgcagagtgcatctcagagtgccgcgaggtctggagcacaatcttccagtactacaacaactacgtctgcttccggatcacaagccgcctcgcaatccgcctccagtgctgcgtcacaagcttcagcttcttcatttgcacaggcctcctctgcatctctcgcagcttcctcttcgttctcttcagcattttcttcggctaacagtttgtctgctcttggtaacgtcgcatatcaactcggtttcaacgttgctaacaccctaggtattggtaatgcaccaggactcggtgccgccctttcacaggcagtgagctctgtcggcgtcggtgcatcatcaagtacttacgccaatgtcgtgtctaatgctgtgggacagtttttagcaggacaaggtgtcctgaatgctgcaaatgcaggtacgtcttc

SEQ ID NO: 709 - DNA, 563 bp, synthetic construct
  misc_feature 1..563: note = Description of Artificial Sequence: Synthetic polynucleotide
  source 1..563: mol_type = other DNA
gaagacttagcaggttctcttgcttcgagctttgctagtgcattgtccgctagcgctgcatccgtcgcttcttctgctgcagcacaatctgcatcacaaagccaagctgctgcttctgctttttctagggctgcttctcaatcggctagtcagtcagctgctagaagtggagctcaatcttcgtctaccacgactactacctcagcatccggtagtcaagcggcctcacagtccgcatcatcagccgcttcccaagcttccgcatcgtcattcgcccaggcctcgagcgcctctttggccgctagcagttcgttttcttccgcattctcctccgcaaactctctaagtgctcttggaaatgttgcataccaattgggatttaatgttgctaacactttgggaattggcaatgcgccaggattgggagctgcattatctcaagcagtgtccagtgtcggtgtgggagcttcatcaagcacttatgctaacgtggtttctaacgcggtaggccaatttctcgcaggtcaaggtgttttgaatgctgctaatgcaggtacgtcttc

SEQ ID NO: 710 - DNA, 563 bp, synthetic construct
  misc_feature 1..563: note = Description of Artificial Sequence: Synthetic polynucleotide
  source 1..563: mol_type = other DNA
gaagacttagcaggttctctggcctcgagctttgcctccgcattaagcgcttccgcggcttcagtggcttctagtgccgccgcccagagcgcttcccagagccaggccgctgccagtgctttttcgagagctgctagccaatcagcatcacagtccgcagcgagatccggtgcacaatcttctagtactactaccactacctctgcaagtggatctcaagccgcttcccaatcggcctcttctgctgccagtcaagcatcagcgtcgtcttttgcccaagcttcctctgctagtttagcagcctcgagcagcttctccagcgcattttcttctgctaattcactttcagctttgggtaacgtagcctatcaattgggttttaacgttgctaacacacttggaataggtaacgcacctggtctgggtgcagccctgtctcaagctgtgagctccgtgggcgtcggtgcctcgagttcaacctatgcaaacgtagtatctaacgccgttggacaattccttgccggtcaaggagtacttaacgcagctaatgcaggtacgtcttc

SEQ ID NO: 711 - DNA, 563 bp, synthetic construct
  misc_feature 1..563: note = Description of Artificial Sequence: Synthetic polynucleotide
  source 1..563: mol_type = other DNA
gaagacttagcaggttctctagcttcttctttcgcgtccgctctcagtgcttcggccgccagtgttgcaagctcagctgccgctcagtccgcaagccagagccaggctgcggcaagtgccttttctcgagctgcttcccaatctgcaagtcagagtgctgcacgaagtggagcacaatcatcgtctactaccacaactacttctgctagtggatcccaagctgcttcacaatcggctagttcggctgcatctcaagccagtgcgtcctcattcgcacaggcctcgagcgcttcattagcggcatccagctcattctcgtctgcatttagctccgctaatagtctgtctgctcttggaaatgttgcctaccaacttggattcaacgtagccaatacactgggaataggcaacgctcctggcctcggtgctgctctgtcacaagcagtttctagcgtaggtgtaggtgcttcttccagcacctatgctaatgtggtgtcaaatgctgttggacaattcctggcaggacaaggtgtgctgaacgccgctaatgcaggtacgtcttc

SEQ ID NO: 712 - DNA, 563 bp, synthetic construct
  misc_feature 1..563: note = Description of Artificial Sequence: Synthetic polynucleotide
  source 1..563: mol_type = other DNA
gaagacttagcaggtagcctcgcatcttcctttgctagcgctctgagtgcctcggctgcaagtgttgcatcaagtgcagccgcacagtctgcttcgcaaagccaagctgcggcctctgcattttccagagcagcatcacaatccgctagccaaagcgctgctaggtccggtgcacaatcatcttcaactactaccaccacttcagcttccggctctcaagctgcatcacagagcgccagttccgccgcctcgcaggcttccgcatcatctttcgctcaagcctcgtccgcttccctagccgctagctcatccttctcaagtgctttttcctccgccaattctctttcagctttaggaaacgttgcttaccaattgggttttaacgtagccaacacacttggcatcggaaacgcacctggtttgggtgctgctttaagtcaagccgtttccagtgtcggtgtgggagctagttcgagcacgtatgctaatgtggtttcgaacgccgtcggacaatttttagcgggacaaggtgttttgaatgcagctaacgcaggtacgtcttc

SEQ ID NO: 713 - DNA, 563 bp, synthetic construct
  misc_feature 1..563: note = Description of Artificial Sequence: Synthetic polynucleotide
  source 1..563: mol_type = other DNA
gaagacttagcaggttcattagcatctagctttgcatctgcactctccgcttcagctgcctcggtggcctcgtccgctgcagcccagtcagctagtcaaagtcaggctgcagcttctgccttttctagggctgcatctcagtcgggtagccagagtgccgctcgatctggtgctcaaagctcgagtactaccacaacaacaagtgctagtggatctcaggccgcgagtcaatcagcatcgtctgccgcttcacaagcttcggcttcttcttttgcgcaagctagctcggcttccttggctgcttccagctccttcagctccgcattttcaagcgctaatagtctctcggctttaggaaatgttgcctatcaactcggtttcaatgtggctaacactttgggtataggtaatgctccgggattgggagcagctttatcgcaggccgtctcttctgtaggagtaggcgcttctagctctacatacgctaacgttgtcagtaacgcagttggtcagtttttggctggacagggagtgttaaatgctgctaatgcaggtacgtcttc

SEQ ID NO: 714 - DNA, 563 bp, synthetic construct
  misc_feature 1..563: note = Description of Artificial Sequence: Synthetic polynucleotide
  source 1..563: mol_type = other DNA
gaagacttagcaggtagtttggcttcttcatttgcttcggcattgagcgcgagtgcagcttcagtcgcttcgtcagctgccgcacaatcagcctctcagtcacaagctgctgcatccgccttttcccgagctgcttcgcaatcagcaagccaatcagcagcaaggtcaggagcgcaaagtagctctactactaccaccacatcagcatcaggttcccaggccgcaagtcaatccgcaagctccgcagctagtcaggcatcggcatcttccttcgcacaagcttcttctgcttccttggccgcctcttcatcattttccagtgcgttctccagcgccaactccctatcagctctcggtaacgttgcttatcaactgggtttcaacgtagcgaacactcttggcataggtaacgcacctggattgggagcggcattgtctcaggctgtttcttctgttggtgtaggagcatcctcctccacttatgctaatgtcgtctccaacgctgttggacagtttttagctggtcaaggagtactaaatgcagctaacgcaggtacgtcttc

SEQ ID NO: 715 - DNA, 563 bp, synthetic construct
  misc_feature 1..563: note = Description of Artificial Sequence: Synthetic polynucleotide
  source 1..563: mol_type = other DNA
gaagacttagcaggtagtttggcctctagttttgctagcgctttgtccgctagtgctgcctctgttgcatcgtcagctgcagcacaatcagcgtctcaatcccaggcagcagctagtgcattttctagagcagcctcacaaagtgcttcccaaagtgccgccaggtcgggagctcaatcatctagcaccactacaacaacttctgcttcgggatctcaggccgcatcccagtccgcttcctccgccgcatctcaagcttctgcctcttcatttgcccaggcttcatctgcatcattggctgcttcgtcctccttttcatccgccttttctagtgctaactccttgtcagcacttggaaacgttgcttaccaactaggatttaatgtagccaatacacttggcataggaaacgcccctggattaggagcggcattatcacaggctgtctctagtgttggagtgggagcttcaagctctacgtacgcaaacgttgtctccaatgccgttggacagtttttggctggtcaaggagttttaaatgcagctaacgcaggtacgtcttc

SEQ ID NO: 716 - DNA, 563 bp, synthetic construct
  misc_feature 1..563: note = Description of Artificial Sequence: Synthetic polynucleotide
  source 1..563: mol_type = other DNA
gaagacttagcaggtagtcttgcaagctcatttgccagcgcactgtctgcttctgccgcttcagttgcatcaagcgctgcagctcagagcgcatctcaaggacaagctgctgcttccgcattctctagagcagccagtcaaagcgcctcgcagtctgctgcaagatctggtgctcaatcatcaagtacgacaacaacgacttcagcgtcgggaagtcaggccgcttctcaatctgcttccagtgctgcctcacaagcctcagcttcgagcttcgcccaagccagttccgcctccctggcagcttcttctagcttttccagcgctttctcttcagctaattctctaagtgcgctgggaaatgttgcttaccaattgggtttcaacgtagccaacacactaggtatcggaaacgcaccaggtctaggtgcagctttatcccaagcagtttcaagtgttggtgtcggtgcttcttcctcaacctatgccaacgtagtctcaaatgccgttggtcaatttctggccggacagggcgtgctgaatgccgcaaatgcaggtacgtcttc

SEQ ID NO: 717 - DNA, 602 bp, synthetic construct
  misc_feature 1..602: note = Description of Artificial Sequence: Synthetic polynucleotide
  source 1..602: mol_type = other DNA
gaagacttagcaggttcggcgacaagctctactaccacgactactaccgtttccaaatccgctgctgctgcagctgcagcagcagctgctgcaagttcagcctcgtctgctagtagagattctgatcgatctagtaccgctgcggaggcttacgcttctagcagtgcttacgccagtagcaatttcgaaaactacttggctagcgacttgtctaattctgatgagttcgaatcggtatatggctccttatactcctccgcagacgcagcctcgtacgcaagatcttctgcagaatacgcctcgaacacgttaggtctttctaaggaaacatcgtatgccctggcatcagctgcggctaaagcagttagcgaatccggatcaggatcatccagttacgccagagcttacgccgtagctaaatcctctgctgtggtcttgcaaaactctggtgtacttagcagttctaactccagaagtttgtcgtcagcttttgccaaggctttcgcatcttcttccgcgagtagctatgcttcgtatcagtctaggaacacaggtacaagtagggcatcatctgctggttctggtgcagcaggtacgtcttc

SEQ ID NO: 718 - DNA, 602 bp, synthetic construct
  misc_feature 1..602: note = Description of Artificial Sequence: Synthetic polynucleotide
  source 1..602: mol_type = other DNA
gaagacttagcaggttccgcgacctcatccactactacaaccacaacagtttccaaaagcgctgctgccgcagcagcagctgcggctgccgcttcctccgctagttccgctagtagagactcggatagaagtagtaccgcggctgaggcgtatgcctcttcctcagcttacgcctctagcaattttgaaaattatttagcatccgatctatcgaactcagatgagtttgagtcagtgtacggatccgtctattcatcctcggacgctgcctcttatgcaagatcgtctgccggttacgccagtaacacccttggattgtccaaagaaacgagttacgctctggcctccgccgctgctaaagcggttagtgagtctggaagtggatcttcttcttatgctagagcgtacgctgttgctaaatcttccgctgctgttttgcagaactcgggagtcttgagctctagtaacagtcgtagcttgagtagtgcatttgctaaggcttttgcttcctcttcagcaagttcttatgcctcgtatcagtcacgtaatacaggaacttcacgagcgtcatccgcaggctcgggcgctgcaggtacgtcttc

SEQ ID NO: 719 - DNA, 602 bp, synthetic construct
  misc_feature 1..602: note = Description of Artificial Sequence: Synthetic polynucleotide
  source 1..602: mol_type = other DNA
gaagacttagcaggtagcgccacttcttccactacaactactacgacagtatctaaatcggctgccgcagctgctgcagctgccgctgccgcttctagcgccagcagcgcctctcgtgattcagacagatcttcgactacggccgaggcctacgcatcttcgagcgcttatgcctcaagcaattttgaaaactacctagctagcgatctttcgaattctgacgagtttgaatcggtgtacggaagcgtgtattcgtctagtgatgcagccagttatgctcgttcatccgcaggttatgcttcaaatacactcggactgtccaaggaaacttcctacgcacttgcctctgctgccgcgaaagctgtttctgaaagtggttccggaagttcttcatatgctcgcgcatatgcagtggccaaaagttccgccgtagtattgcaaaattctggtgtcctaagctctagcaattcgcgatctttatcctcagcatttgctaaggcctttgcgtcgagtagtgcctcctcctacgcgtcctacaaaagtcgtaacacaggtacgtctagggcaagcagtgctggtagtggtgctgcaggtacgtcttc

SEQ ID NO: 720 - DNA, 602 bp, synthetic construct
  misc_feature 1..602: note = Description of Artificial Sequence: Synthetic polynucleotide
  source 1..602: mol_type = other DNA
gaagacttagcaggtagcgcaaccagttccacaaccactactacaacagttagtaaaagcgctgcagctgccgctgctgcggctgctgctgccagttccgcatctagtgcttccagagactccgatagaagctctactgctgccgaagcttacgcttcttcctccgcttacgctagctcgaattttgaaaactacctggcaagtgatcttagcaattcagatgaattcgaaagtgtatacggatccttgtattcaagtagtgacgcagcttcttatgcgcgttcatccgctggttacgcctccaatacactgggactttccaaagaaacatcttacgcgttggcttctgctgccgctaaagcagtgtccgagtccggatctggtagtagttcatacgcgagggcttacgctgtggctaagtcctcagccgtagtcttgcaaaactctggtgttctatcatctagtaactctagaagcctctcatctgccttcgcaaaggctttcgcctcttcctcggcatcatcatatgcttcatataagtcaaggaatactggcacctcgcgtgctagctctgctggaagtggagctgcaggtacgtcttc

SEQ ID NO: 721 - DNA, 602 bp, synthetic construct
  misc_feature 1..602: note = Description of Artificial Sequence: Synthetic polynucleotide
  source 1..602: mol_type = other DNA
gaagacttagcaggttcagcgacttcgtctacaactacgaccaccacagtttctaaatctgcagcagcagctgccgcagctgcagctgctgctagtagcgctagctcggccagaagggattctgacagatcctcaagtacagcagaagcctacgcgtcctcatctgcttatacgtcatctaattttgagaactatctagccagtgatttgagtagctccgacgagtttgagtccgtttatggatctctctacagtagttcagatgccgcttcgtacgctcgatcgtctgctgaatatgccagtaataccctgggtctgtctaaagagacaagttatgctctcgcttctgcggccgccaaagctgtttcagaaagcggttctggctcatcgagttacgctagagcttatgccgtggccaaaagctctgccgtggtgttacaaaattcaggagttttgtcaagctcgaattcaagaagtttatcgtctgcatttgccaaggctttcgccagctcttccgcatcatcatacgcttcttacaaatctagaaataccggtacttccagagcctcctcagctggctcgggagctgcaggtacgtcttc

SEQ ID NO: 722 - DNA, 602 bp, synthetic construct
  misc_feature 1..602: note = Description of Artificial Sequence: Synthetic polynucleotide
  source 1..602: mol_type = other DNA
gaagacttagcaggtagtgctacttcgtcaacgacaacaactacaacagtttccaaatcagctgcagcggccgctgccgctgctgcggctgcttcctcagctagctctgctagcagagattcagaccgaagttctactgctgcagaggcatatgcttccagttctgcatacgcttcttcgaatttcgagaactatttggcctcggatttgtcgaactcagacgagtttgagtccgtatacggttctttgtactcctccgcagatgctgcatcttacgctagctctagttctgaatatgcatcaaataccctcggtctatctaaggaaacctcgtatgctcttgcatcagctgctgctaaggctgtgtcagaatccggaagtggctcctcttcctacgcaagagcatatgccgtggccaagagctctgccgtggttttaaggaactcaggtgttctttcctcatcaaactccagatccctttcgtccgcatttgcgaaggcattcgcttcatcctctgcatcaagttatgcatcatataaaagtagaaatacaggcacctccagggcatctagtgcgggctcaggagccgcaggtacgtcttc

SEQ ID NO: 723 - DNA, 602 bp, synthetic construct
  misc_feature 1..602: note = Description of Artificial Sequence: Synthetic polynucleotide
  source 1..602: mol_type = other DNA
gaagacttagcaggttcagcaacctcatcaactacaacaacgaccactgtgtctaagtctgctgctgcagctgctgcggcggccgcagccgctagttctgcatcgtccgctaggagagattctgatagatcttcaagcaccgccgaagcatatgctagttcctctgcttacacctcttccaattttgaaaattacctcgcttccgacttaagttcctcagatgaattcgaatccgtttatggtagtctgtattctagttctgacgctgcttcttatgctagaagctctgcggaatacgctagcaacactttgggtttatcaaaagaaacatcttacgctttggccagtgctgctgctaaggccgtctcagaaagtggatctggtagcagttcttacgccagagcctatgctgtagctaagtcatctgctgtagtcttgcagaactccggagtcttgtcgagcagtaacagtagatcattgagttcagcttttgcgaaagcttttgcatcctcttcagcttcatcctacgccagctcaaaatcaaggaacacaggaacctcccgagctagtagcgcaggttccggagctgcaggtacgtcttc

SEQ ID NO: 724 - DNA, 581 bp, synthetic construct
  misc_feature 1..581: note = Description of Artificial Sequence: Synthetic polynucleotide
  source 1..581: mol_type = other DNA
gaagacttagcaggttcttttgcctctgcctcagcatacgctttcgcatttgctagcgccttttctcaagtcttatccaattatggtttgctcaatatcaataacgcttacagcttggcctcgagtattgctaacgcggcgagcgcttcagcatcatcagctgcagctgctgcagcttcatcttcttctgctgcagcggccgctgcagccgcttctggcgctgcaggtagcgcagctgcaacttcgaccactacatcgacatcgtcatctactgcagcagctgccgcttctgccgccgcttcagctgccgcctccgccagtggagccgccagagctgccggagcctcttccgccgcgtcagacgcttccgcatcaagcagtttacagcaatccttgggttcagcattggctcagtcatcttcctttgccgcagcctttgcccaggcaaactcagcagcatccgccgccgcaattgcatacgctctagcacaaatcgttgctaaccaaataggattttcatcttactcttcagctttcgctagtgcggcttcatcagccgtttcatcactaggtacgtcttc

SEQ ID NO: 725 - DNA, 581 bp, synthetic construct
  misc_feature 1..581: note = Description of Artificial Sequence: Synthetic polynucleotide
  source 1..581: mol_type = other DNA
gaagacttagcaggtagctttgcatcggcctcagcttatgcatttgctttcgcctcagctttttcgcaagtcttaagtaattatggattattgaacatcagtaacgcctacagtctagccagttctattgcatccgctgctagtgcatctgcaagttctgccgccgccgctgcagcgtccagctctgcagctgctgctggtgccgccgcagcttccggcgctgcaggtagtgctgcatcaacgagtactacaacttcaactagtacaagtaccgcagccgcagctgcaagcgcagcagctgcagcagctgcttctgcatcaggtgcagcccgagcagctggcgcgtcctcagctgcttccgctgcatctgcttccagcagcctgcaacaatctttgggatctgccttagcacaaagttcttccttcgcagctgcatttgcccaagccaattctgctgcttctgcggctgccatagcctacgccctggcccagactgttgcaaaccagataggtttttccagctattcgtctgcatttgctaccgccgcttcttctgctgtttcctccttaggtacgtcttc

SEQ ID NO: 726 - DNA, 581 bp, synthetic construct
  misc_feature 1..581: note = Description of Artificial Sequence: Synthetic polynucleotide
  source 1..581: mol_type = other DNA
gaagacttagcaggttcattcgcatccgctagtgcctatgcctttgcatttgccagtgcattttctcaagtcctgtcgaactatggattattaaatatttccaacgcctacagcttggcttcttcaatcgctaatgcagcttcggcttcagccagtagcgccgctgcggccgctgcatcatcttcctctgccgcagccggagcagccgcagcttcaggagcagccggctcggttgccgctacaagtactactactacggctagtacttcaactgccgcggctgccgcttctgccgctgctgcagctgctgcttctgcttctggcgccgctagggccgctggtgctagttcagctgcaagtgccgcctcagcctccagtagtttgcagcaatcactgggaagtgccttggctcaatcctcatcattcgccgccgcattcgcgcaagccaattcagcggcatctgctgctgctatcgcttacgctttggctcaaacagtggcaaaccaaattggattcagttcatactcctccgcgtttgcatcagcagctagctccgccgtttattcattaggtacgtcttc

SEQ ID NO: 727 - DNA, 587 bp, synthetic construct
  misc_feature 1..587: note = Description of Artificial Sequence: Synthetic polynucleotide
  source 1..587: mol_type = other DNA
gaagacttagcaggtgccagcgcatctgcctacgctagcgctatctctaatgctgttggtccttatttgtacggtctaggactctttaaccaagccaacgcagcttcctttgcttcctccttcgcaagtgcagtcagttctgccgtcgcttcagcttccgctagcgctgcttcctcagcatatgcccagtccgctgccgctgcacaagcacaggcagcttcatctgccttttcacaggctgccgctcaatcagccgcagcagccattgctggagcaagtgctggtgctggagcgtccgctggtgcaggagcttcagcaggagcaggtgctgttgcagctagtcaggcagccgcatcttcatctgcaagtgccgttgcgtcagctttcgctcagtcagcctcatacgcactagcttcaagttctgcttttgccagcgcttttgcttccgcaacatcagccggttacttgggatctttggcgtaccaattgggtttaaccaccgcatacaatttgggtttaagtaatgctcaagctttcgcaaacactctgtcccaggctatcgttggagtaggagtaggtacgtcttc

SEQ ID NO: 728 - DNA, 620 bp, synthetic construct
  misc_feature 1..620: note = Description of Artificial Sequence: Synthetic polynucleotide
  source 1..620: mol_type = other DNA
gaagacttagcaggtgcttctgccagtgcgtacgcttcggctattagcaacgccgtaggtccatatttatacggtttaggcttgttcaatcaagcaaacgctgcatctttcgcttcaagtttcgcaagtgcagtttcaagtgcagtcgctagtgcttcggcctctgccgcttcatctgcctatgcgcagtcagcagctgcccaggctcaagccgctagttctgcattctctcaggcagcagcgcagtccgccgctgcagcttctgcaggagctagtgccggagctggagcgtcagctggagctggtgcagttgccggagccggagcggttgcgggcgcaggtgccgttgcaggtgctagtgctgctgccgctagccaagccgctgcatcgtcatcagcatctgctgtggctagtgcttttgctcagtcagcttcctatgctctggcttcatcaagtgcgtttgctaatgcatttgctagcgctactagtgcgggttacttgggatccctggcctatcaattgggactgacgactgcatacaaccttggattgagcaacgctcaagccttcgcttctactctgtctcaagccgtgacaggagtgggcttaggtacgtcttc

SEQ ID NO: 729 - DNA, 641 bp, synthetic construct
  misc_feature 1..641: note = Description of Artificial Sequence: Synthetic polynucleotide
  source 1..641: mol_type = other DNA
gaagacttagcaggtgcatcagcaagtgcttacgcatccgctatctcaaatgcagttggcccttacttgtacggattaggtctgttcaaccaagctaacgctgcgtcctttgcctcttccttcgcttcggcagttagttcggcagtcgcttcggctagtgccagtgctgcatcttcggcatatgcccaatctgctgccgctgcacaagcacaggctgcgtcgagcgctttttcacaggctgctgcacaatcggcggctgcggcttctgctggtgcatcggctggtgccggagcatcagcgggtgcaggagcttcagctggagctggtgcaagtgcaggcgcaggagctagcgccggcgctggtgctattgcaggtgctggagccgcagccacgagtcttgctgcagcctcctcatctgcttccgctgtagcttctgcttttgcacaatcagcatcttctgcattggcctcttcttccgctttcgctaatgcttttgctagtgccacctctgtctccgcactgaatagtatagcttatcagatgggtgtgtccgctgcaaatattttgggaataagcaacgcacaaggatttgcaaatgctttgagccaggctgtaggtgttgttggtgtaggtacgtcttc

SEQ ID NO: 730 - DNA, 575 bp, synthetic construct
  misc_feature 1..575: note = Description of Artificial Sequence: Synthetic polynucleotide
  source 1..575: mol_type = other DNA
gaagacttagcaggtatacttactcaagaaaatgcagctggtttagcttcatccgtttcctccggtatatcaagtgcagcaagctcggtggcagctcaagcggcctcagctgcacaatcttctgcctttgctcagagccaggcggccgctcaagctttttcgcaggcagcctcaagatcagcgagccaatccgcggctcaagctggatcttcctccactagtacaacaactactacatcacaagctgcttctcaagctgcctcccaatctgcctcctcttcgtctagcgcagcttcacagagtgcttttagtcaagccagttcttcggctttagcttcgagttcaagtttctccagtgccttttcttcggcatcgtctgccagcgccgttggtcaagtaggataccagattggacttaatgcagctcaaactcttggtattagcaatgcaccagcgttggccgatgctgtttcacaggctgtcaggaccgttggagtcggtgcctcaccatttcaatacgcaaatgccgtctctaatgccttcggacagctcttgggcggacaaggtacgtcttc

SEQ ID NO: 731 - DNA, 575 bp, synthetic construct
  misc_feature 1..575: note = Description of Artificial Sequence: Synthetic polynucleotide
  source 1..575: mol_type = other DNA
gaagacttagcaggtattttgacacaagagaatgcagccggactggcttcctccgtttctagcgctataagctccgccgcttcctcagtcgctgcccaagcagcctcagccgcacaatcttctgcttttgcacaaagtcaagctgcagcacaagctttttctcaagctgccagcagatcagcttctcagagtgctgcacaagctggaagctcaagtactagtactactaccaccacctcacaggctgcgtcgcaagctgcttcacaatcagcaagctccagctctagtgctgcctcccagagcgcattctcacaagcgagttcatctgcgttagccagtagctctagtttttcttcggctttttcttccgcctcgtccgcatccgctgttggacaggttggataccagatcggcttgaacgccgcacagacattgggaatttctaacgcaccagcccttgcagatgctgtaagtcaggctgtacgtacagtgggcgttggagcttccccattccaatacgctaacgccgtctccaacgcctttggccagttgttgggaggccaaggtacgtcttc

SEQ ID NO: 732 - DNA, 575 bp, synthetic construct
  misc_feature 1..575: note = Description of Artificial Sequence: Synthetic polynucleotide
  source 1..575: mol_type = other DNA
gaagacttagcaggtatcttgactcaagaaaatgccgctggattagcctcttctgtgtcatcggccatttccagtgctgctagttccgttgcagcacaagctgctagtgcggcacaatcttcagctttcgctcaatcccaggcagctgcacaagcattttcccaggctgcatcgaggtctgcttcccagtctgctgcccaagcgggatcatccagcacttccacaacaaccactacatcacaggctgcaagtcaggcagcatctcaatcagcaagctcttcatacagcgcggcttcgcagtcagctttttctcaagctagctcatccgctttggcttctagttcttcgttctcctcagctttcagctctgctagtagcgcttctgccgttggtcaagttggttatcaaattggactgaatgccgctcagacattaggaatctctaatgcaccagcattcgctgatgccgtttctcaggctgttagaactgtcggagttggagctagcccattccaatatgctaatgctgtttcaaatgctttcggccaactgctaggaggccaaggtacgtcttc

SEQ ID NO: 733 - DNA, 575 bp, synthetic construct
  misc_feature 1..575: note = Description of Artificial Sequence: Synthetic polynucleotide
  source 1..575: mol_type = other DNA
gaagacttagcaggtatcctgactcaagaaaatgctgcaggtttggcttcatccgtatcttctgctatttctagtgcagctagctcagttgcagcccaagcagcatccgcagcccaaagctcagctttcgcacagtctcaagctgctgcacaagctttttctcaagcagcctccagaagtgctagccaatctgcagctcaggctggaagttcatctactagtacgactacgacaacatctcaagccgcttcacaggctgcgagtcagtccgcttcatcttcctattccgctgctagccagtccgccttctctcaggcttcttcgtccgcattagcctcctcatcgtcattttcgtctgccttctccagtgcttcttctgccagtgcggtaggacaggtaggataccagatcggtttgaacgcagctcagaccttgggaatctctaacgcccctgcctttgccgacgcagtcagtcaggcggttagaacggtaggagtaggtgctagtccgttccagtatgctaatgctgttagtaatgctttcggtcaattgttaggaggacaaggtacgtcttc

SEQ ID NO: 734 - DNA, 575 bp, synthetic construct
  misc_feature 1..575: note = Description of Artificial Sequence: Synthetic polynucleotide
  source 1..575: mol_type = other DNA
gaagacttagcaggtattctcacgcaagagaacgctgccggtctggcatcgagtgtcagttccgccatttcgtccgcagcatcttctgtggcggcacaggccgcttcagctgcacaatcatcagcttttgcccaaagtcaagcagccgcccaagctttatcgcaagcagcatctaggtctgcatcacagagcgcagctcaagctggctcgtcgtctacctccaccacgaccactacttctcaagccgcatcccaagccgcaagtcagagtgctagtagctcgtattcagcagcctcgcaaagtgcctttagccaagcctctagttcggccttagcatccagttcgtcgttctcaagtgcttttagtagtgccagcagtgcgtctgctgtcggacaagtaggttaccagattggcttaaatgctgctcagacactgggaatctcctccgctcctgccttcgccgacgctgttagccaggcggtcagaacagttggagtgggcgcttctccatttcaatatgcaaatgcagtctctaacgcctttggtcagttactgggaggtcaaggtacgtcttc

SEQ ID NO: 735 - DNA, 575 bp, synthetic construct
  misc_feature 1..575: note = Description of Artificial Sequence: Synthetic polynucleotide
  source 1..575: mol_type = other DNA
gaagacttagcaggtattcttactcaggaaaacgctgccggtttggcttcttcagtttcttcggcaatttcgtctgctgcgtctagcgtagcatcccaagctgccagtgctgcacaatcaagtgcttttgcacaaagtcaagctgctgctcaggctctatcccaagcggcttctaggtcggcgtctcagagcgctgctcaagctggttcatcatctacctctaccacgacgaccacttcgcaagcagcttcccaggcagcctcacaatcagcatctagttcgtactcagctgcttctcaaagtgccttttcccaagcttcctcctccgcactagcaagttcatcaagcttcagttctgcatttagtagtgcctcttcagctagtgctgtgggtcaggtaggataccaaatcggtctaaacgccgcacagacacttggtatctccaatgctccagcctttgctgatgctgtgtcccaagcagtacgaactgttggcgttggcgcctcgccattccaatatgctaacgcagtgtctaatgccttcggtcaattgttgggagagcaaggtacgtcttc

SEQ ID NO: 736 - DNA, 536 bp, synthetic construct
  misc_feature 1..536: note = Description of Artificial Sequence: Synthetic polynucleotide
  source 1..536: mol_type = other DNA
gaagacttagcaggtgttttgaatgctggtaacgcttcggctcttgctggttcttttgcaagagccttgtctgcaagcgctgaatcacagagttttgctcaatcacaagcttatcagcaggccagtgcttttcagcaagctgctgctcagtccgcagcacagtcagcttctagagctggcagcacctcaagttctacgacaacaactacttcgggagctacatctcaagcagcttctcaaagcgcatcttctagttattcgagtgcctttgcacaagccgcttcttcctccctcgcaacctcttccgccatttccagagcatttgcctcagttagttcagcctctgccgcaagtagtctagcttacaacataggactatcagctgctcgcagtttgggaattgcatccgataccgccctggctggtgcattggcccaggccgtaggaggtgttggtgcaggtgcttcagcgtcagcgtatgcaaacgctatagctagagccgctggacaattcttggcaacacaaggtacgtcttc

SEQ ID NO: 737 - DNA, 536 bp, synthetic construct
  misc_feature 1..536: note = Description of Artificial Sequence: Synthetic polynucleotide
  source 1..536: mol_type = other DNA
gaagacttagcaggtattgcttccgatacagccttagctggagcattagctcaggcggttgccggtgttggtgctggagcttcggctagcacatacgccaacgtcatagccagagccgcaggacaattcttggcaacacagggcgttttagatgctggcaatgcaagcgctcttgctggttctttcgccagagcgctgagtgctagtgctgagagtcagagctttgcccaaagccaagcttttcaacaagcttcggccttccaacaagccgcaagtcaatcggctggtcaatctgcttcacgtgctggttcaacatcgagttcaaccaccactacgaccagcgcagcagcctcgcaggctgcatcccaatctgctagctcatcatcttcttctgcatttgctcaagccgcttcgagttctctggctacttcctcagcaatctctagagctttcgcgtccgtgtcatctgcgtctgcagcatcgagtttggcttataccatcggacttagtgctgctcgatctttaggtacgtcttc

SEQ ID NO: 738 - DNA, 536 bp, synthetic construct
  misc_feature 1..536: note = Description of Artificial Sequence: Synthetic polynucleotide
  source 1..536: mol_type = other DNA
gaagacttagcaggtattgcttccgataccgcattagcaggagccttggcacaggctgttgctggtgttggtgcaggtgcatctgcgtctacatatgcgaatgtcattgcacgtgctgctggtcaatttcttgctactcaaggtgtcttggatgcaggtaatgcttccgcattggccggatcgttcgccagagctctttctgcttcggctgaatcacaatctttcgcccaatcacaagcctttcagcaggctagcgcttttcaacaggccgcttctcaaagtgcaggacagtcagcttcccgtgctggttccaccagttcttcgacaacaactacaaccagcgccgctgccagtcaagctgcatcacaatcagctagttcatcaagcagtagtgctttcgcacaagcagcaagttcctccttggcaacttcttctgccatttcaagagcttttgcttcagttagtagcgcttctgcggcatcgtcgcttgcatatacgattggcctgtccgccgctagaagtctaggtacgtcttc

SEQ ID NO: 739 - DNA, 536 bp, synthetic construct
  misc_feature 1..536: note = Description of Artificial Sequence: Synthetic polynucleotide
  source 1..536: mol_type = other DNA
gaagacttagcaggtatagcctccgatacggcactagctggcgcacttgcccaggcagttgctggagtaggtgctggtgcttcggctagtacttacgctaacgttatagctcgtgcagctggtcagtttttggcaacccaaggagtgctggatgcaggcaatgcaagtgcattggctggtagcttcgcccgagctcttctggcttctgcggaaagtcaatcatttgcacagtcacaagcttttcaacaagcttctgccttccaacaggctgcaagtcagtcagccggacaatctgctagtagaagtggatcgagatcgagttcaactactactacaacttctgctgctgcatcccaagcagagtcacagtctgcctcatcatcctcctctagcgcttttgctcaggccgcctcctcaagcctggccacttcaagtgcaatttcacgtgctttcgcttcagtttcttctgcttccgccgcttcctctcttgcctataccattggattgtctgcagcacgtagtctaggtacgtcttc

SEQ ID NO: 740 - DNA, 536 bp, synthetic construct
  misc_feature 1..536: note = Description of Artificial Sequence: Synthetic polynucleotide
  source 1..536: mol_type = other DNA
gaagacttagcaggtatcgcttctgacacagcattagctggagcattggctcaagccgtcgcaggtgttggtgcaggagcctctgcctcaacatacgcaaatgtcatagcgagagcagctggccagttcttggctacacagggtgtcctagacgctggtaatgctagtgctttggctggatctttcgccagagccttgtcagcatctgctgagtcgcaatcttttgcccaaagtcaagctttccaacaggctagtgccttccagcaagcagccagccaatcagctggacaatcagcgtccagagccggttccacgtctagttccactaccacaactacctctgctgccgcaagtcaagcagcaagtcaatccgcttcttcgagtagttcctctgcttttgcacaagctgctagctcctctttggccaccagttctgctatctcgcgtgcctttgccagcgttagctcagcttccgcagcttcttcattggcttatactattggtttatctgctgccagaagtttaggtacgtcttc

SEQ ID NO: 741 - DNA, 536 bp, synthetic construct
  misc_feature 1..536: note = Description of Artificial Sequence: Synthetic polynucleotide
  source 1..536: mol_type = other DNA
gaagacttagcaggtattgcttcagatacggctttagctggcgccctagcccaagctgtggccggtgtaggtgctggagcatcggctagtacttacgcaaatgtgattgccagggctgccggtcaatttcttgctactcaaggtgtactggatgctggtaatgcctccgccttggcaggatctttcgctagagctttgagcgcatcggcagaatcacagtcttttgctcaatcccaagcattccaacaagccagtgcgttccagcaggcagcttcccaaagcgcaggacagtctgcttcgagagctggaagtacatcttcatccaccactacgacaacctctgccgctgcctctcaggcagcgagccaatcggcctccagttcttcatcttccgcatttgctcaggctgctagtagctcccttgcaacttcctctgctatatcgagggccttcgcttcagtgtcaagtgcttctgctgcaagttcgcttgcttataccattggattgtcggcagccagatcactaggtacgtcttc

SEQ ID NO: 742 - DNA, 536 bp, synthetic construct
  misc_feature 1..536: note = Description of Artificial Sequence: Synthetic polynucleotide
  source 1..536: mol_type = other DNA
gaagacttagcaggtattgctagtgatactgctttagccggagctctggctcaagctgtggctggtgttggtgcaggagcatctgctagcacttacgctaacgttattgctagagctgccggtcagtttctggctactcagggagttttggatgcaggtaatgcgtctgccctcgcaggttccttcgccagagccctgagtgcctctgccgagtcccagtcatttgctcagagtcaagcttttcagcaagcttcggcctttcaacaagccgcatctcaatcggcaggacagtcagcatctagagcaggtagtacctcaagctcaaccactactaccacctcggttgctgcttcgcaagctgcttcacaatccgccagctcatcttctagttcagccttcgcacaagctgcctcatcctcattggccaccagtagcgccatatcaagagctttcgcaagtgtttcatcagcgtctgctgcatcatccctggcctataccattggattgagtgccgcaaggtccttaggtacgtcttc

SEQ ID NO: 743 - DNA, 536 bp, synthetic construct
  misc_feature 1..536: note = Description of Artificial Sequence: Synthetic polynucleotide
  source 1..536: mol_type = other DNA
gaagacttagcaggtattgcttccgatactgctctggctggagctcttgcacaggctgtggcgggtgttggagctggtgcatctgcctcaacttacgcaaacgtgattgcaagagctgccggtcaatttttggcaactcaaggagtgttggacgctggtaatgcatcagccttagccggatcttttgcaagggctctatctgccagtgctgaatcgcaatcctttgcccaatcacaagcctttcagcaggcttccgcttttcaacaagcagcttcccaaagcgctggacaatcagctagtagggctggaagtaccagctcctcaactactactaccacatccgccgccgcttcgcaggctgcaagtcaatcagcctcctcatctagctcatccgcatttgcacaagctgcttcatcatctcttgcaacttcatctgctatctctagagcttttgctagcgtatcaagtgcaagcgctgcatcttccctagcctatactattggattatctgccgctagatctttaggtacgtcttc

SEQ ID NO: 744 - DNA, 536 bp, synthetic construct
  misc_feature 1..536: note = Description of Artificial Sequence: Synthetic polynucleotide
  source 1..536: mol_type = other DNA
gaagacttagcaggtattgcctcagatactgcattggctggtgctttagctcaggccgttgcaggtgttggagccggtgcctcagctagtacctatgccaacgttattgctagggccgcaggacaatttttggcaactcaaggagttttggatgccggcaacgcttccgcacttgcaggttccttcgcaagagctttgtcagcttcagctgaatcacaatcttttgctcaatcgcaggcgtttcaacaagctagcgctttccaacaagctgcatcacagtcagccggtcagtcagcgagtagagcaggttcaacctccagttctactacgactactactagcgccgctgcttctcaggccgcatctcagtccgcttcctctagttcttcctcagcatttgcccaggctgctagcagctccctagcaacaagttccgcaatatctcgtgcatttgcttccgtttcttcagcatcagcagcctcctcactggcctacacaataggactatctgctgccaggagtctaggtacgtcttc

SEQ ID NO: 745 - DNA, 536 bp, synthetic construct
  misc_feature 1..536: note = Description of Artificial Sequence: Synthetic polynucleotide
  source 1..536: mol_type = other DNA
gaagacttagcaggtgacaccgctgcttcctatggtaatgctttgagcacggcagctggacaattttttgccacggctggattgttaaatgccggaaatgcgtccgcattggcttcaagcttcgccagggctttttctgctagcgctgaaagtcaatcatttgctcagtcccaggctttccagcaagcatcagcatttcaacaagcagcttctagatctgcttcccaatccgcagctgaagctgactcaacgtcatcttcgacaaccacgactaccagcgctgcccggtcccaagctgctagtcaatcggcatctagttcttattcatcggcattcgctcaggcggccagttcaagtttcgcaatcagctctgccttgtcgagagcattttcttccgtttcaagcgcatctgcagcatcttctctagcatatagcatcggcttaagtgccgctaggagcttaggaattgctgacgccaccggccttgctggtgcccttgctcgtgctgtcggtgcgcttggacaaggtacgtcttc

SEQ ID NO: 746 - DNA, 536 bp, synthetic construct
  misc_feature 1..536: note = Description of Artificial Sequence: Synthetic polynucleotide
  source 1..536: mol_type = other DNA
gaagacttagcaggtgcgactgctgcttcctatggtaacgcactgtccacagccgcagctcagttcttcgcgacagcgggtctactcaacgcaggaaacgcatccgcgttagcttcatcctttgcaagagcgttctctgcttccgccgagtctcaatcattcgcacaatcacaagctttccaacaggcaagcgcttttcaacaggccgcatctcgttctgcctctcaaagtgcagccgaggctggttccaccagttccagtaccactactaccacctctgctgcaaggagtcaagctgcctcacaatctgcatcatcttcatatagttccgccttcgctcaagcagcatcgagttcattagctacatcatcagctctatctcgtgcctttagctctgtttcgtccgcttctgcagcttcaagcttagcttattccataggactatctgccgccagaagtttgggcattgcagatgctgccggattggctggtgttttagccagggcagctggagctttgggtcaaggtacgtcttc

SEQ ID NO: 747 - DNA, 545 bp, synthetic construct
  misc_feature 1..545: note = Description of Artificial Sequence: Synthetic polynucleotide
  source 1..545: mol_type = other DNA
gaagacttagcaggtcaatttttggccaaccagggtatactaaacactggaaatgcttcatcgttggcgagttctttcagttctgcgctttccgcatctgctgcagccgcccaaagtcaaagtttcgcgcaatcgcaagctgcggctagcgcatttcagcaggcggcctcccaaagcgctagtcaatcagctgcccaatcgggttcgcaatcatcgtctaccactacaactactagtgcatcaggaagtcagtccgcttcacaaagtgcctcttctagttctgccagcgcctcagccttcgctcagcagagctctgccagtctagctgctagctcttcgttctctcaggctttcgcgtctgctgcatccgcttccgcagttggaaacgtcgcctaccaattgggattgtctgcagcacaatctctcggtattgctaatgctggagctctagcatcagcattagcacaaagcgttagttctgtgggtgtgggtgcatctagttcagcttacgctaacgcagtcgctggagctgtaggtacgtcttc

SEQ ID NO: 748 - DNA, 857 bp, synthetic construct
  misc_feature 1..857: note = Description of Artificial Sequence: Synthetic polynucleotide
  source 1..857: mol_type = other DNA
gaagacttagcaggttctcaggcgggttcgcaggcaggatcccaagctggatcgcaggccggatcacaggcggcatcacaagcaggatctcagtcagcctctcaggctagtgctagctcatctgctagcgcatttgcttcggccagtgcgtttgctcagagtgcttctttcgctttatcttcttctagttcttttgcctccgctgtgagctcagccagttcagtctcagcgttgggtaccttaggctatcaagttggactgcaagctgcgggaagcttaggaatctctaatagccaagcatttgcgtcatctatctctcaagctcttacgtctgttggagttggtgcctcctcatccgcttatgcatctgcagtatctggagtggttgctcagtatttgtctggaactggagtattaacatctgcaaacgcacaagctttggctagttctttcgctaatgtatttgctgcatctgccgcctccgcctctgctgcagcctctgcctcttctgctgcttccgcgcagagtgccgcagccgctctcgctcaatcgcagtccgcagcatctgcattctcacaagcggctagtcaggctttttcgcaagctgcatcccaggctggtagtcaagctgcctcacaagctggttctcaagcagctagccaagctggatcccaggccgcctctcaagcaggttctcaggccgcttcacaagctggcagccaagcagccagtcaatctggatctggtgcctcttcgttcactacaacaataagccgttctagtgctggatcgcagacgggttcccaagccggatcccaggcaggcagccaagccggatcacaagcaggtacgtcttc

SEQ ID NO: 749 - DNA, 929 bp, synthetic construct
  misc_feature 1..929: note = Description of Artificial Sequence: Synthetic polynucleotide
  source 1..929: mol_type = other DNA
gaagacttagcaggttcacaggcgggttctcaagccggttctcaggcaggttcccaagctggatcacaggcaggatctcaggcaggatcacaagcaggtagtcaagccggctctcaagctgcttctcaggctggatctcagtccgcgtcacaagcctccgcctcttcttctgcatcagcttttgcgtctgccagcgctttcgcacaatctgcttccttcgcactttcttccagtagttcttttgcttctgctgtcagctcggcatcttccatcagcgccttaggaacgttgggatatcaagtcggactgcaagccgccggatctttgggaatttctaactcacaagccttcgcatcttcaatctcacaagcattgacttccgttggtgtcggtgcttcttcttctgcttatgcaagtgctgtatcgggtgttgttgctcagtacctttcaggaacaggtgtgctgacttccgcaaatgcacaggcattggcaagttccttcgctaacgtgttcgcagcttctgcagcgtctgctagtgctgcagcctctgcatcatcagctgctagtgcccaaagtactgctgccgccttagctcaatcgcaatctgcagcatctgctttttcccaagctgcttcccaagcatttagtcaagctgcttcacaggccggttcgcaagctgcttctcaagcaggatcacaggctgcgtcccaagctggttctcaggctgcttcacaagctggatcgcaagctgcttcgcaggctggttcacaggccgcctcacaggctggatcgcaagcagcttctcaatccggatcaggagctagctcatttactaccaccattagcagatccagtgctggatcgcaagcgggatctcaagcaggcagccaagcaggatctcaggccggatctcaagcaggtacgtcttc

SEQ ID NO: 750 - DNA, 857 bp, synthetic construct
  misc_feature 1..857: note = Description of Artificial Sequence: Synthetic polynucleotide
  source 1..857: mol_type = other DNA
gaagacttagcaggttctcaagctggaagtcaagctggatcgcaagcaggtagtcaggcaggttctcaggctgctagtcaggccggctctcaatccgcatctcaagcttcagcttcttctagcgcttctgcatttgcttctgcttcggcatttgctcaatctgcctctttcgctcttagttcgtcctcatcatttgctagcgcagtttcaagcgcttcatcggtttcagcattgggcaccttgggataccaagtaggactgcaggcggcaggatcactaggaatttctaattcacaggcttttgcgtcaagtatttcgcaggccttaactagcgttggagttggcgcatctagttctgcgtatgcctctgccgtgtccggagtggtcgcccagtacctgtctggcactggtgtgttaacttctgctaatgcgcaagcacttgcatcatcatttgctaatgtttttgcagctagtgctgcgagcgcttccgcagctgcctcagcttcttcagccgccagcgctcaatcagccgctgccgccttggcccaatcgcagtccgcagcctcagcatttagccaggcagcctcacaggccttctcacaagcggcttctcaggctggctctcaagccgcctcacaagctggtagtcaagccgcatcacaggcaggatcccaagctgcatctcaggctggatctcaagctgcctcccaagcaggtagccaggctgcttcgcaatctggtagtggagcttcctcatttacgactactatttctcgttcatctgctggtagtcagacgggtagtcaagctggttcacaagccggttcacaggctggatcacaagcaggtacgtcttc

SEQ ID NO: 751 - DNA, 929 bp, synthetic construct
  misc_feature 1..929: note = Description of Artificial Sequence: Synthetic polynucleotide
  source 1..929: mol_type = other DNA
gaagacttagcaggtagtcaggcaggatctcaagccggatcccaagcgggaagtcaagctggttctcaagctggatcgcaggctggaagtcaggccggatcccaggcaggaagtcaagctgcttctcaagccggaagtcagtcagcctctcaagcctcggcatcttcgtcagcttctgcgtttgcctccgcttctgcattcgctcaaagtgcctcgttcgctttaagttcgtcaagtagtttcgcatcagccgtttcttcagcctcttcgattagtgccctgggaactttgggttatcaggtgggcttacaggctgccggttctttgggcatctcaaatagtcaagctttcgcttcttcgatttctcaggcattgacttctgtcggtgttggtgccagcagttctgcttacgcgtctgctgtatctggagttgttgcccaatatctatctggaacaggtgtgttgacatcggccaatgcacaagctcttgcttcttcttttgccaacgtttttgcagcttcggctgcatcggcatctgccgctgcttctgctagtagtgcaacaagcgctcagtccgctgcagctgcacttgcacaatcgcaagctgccgcttctgcattttcacaagctgcttcccaagcaagttcccaggcttcgagccaggcttcttcccaggcagcttcccaggcctcttcacaagctagctctcaggccggaagccaggctagctcacaggccgcatcccaagctgcaagtcaggctgctagtcaagcagctagtcaagctgcctcccaatctgccgcttcagcacgtgctggagctagcagcgcgtctttcagcgcttcgcagtcaaatgctgcctctcaggctggctctcaagctgcctcacgtgctggctcacaagccgcctcacaggcaggtacgtcttc

SEQ ID NO: 752 - DNA, 452 bp, synthetic construct
  misc_feature 1..452: note = Description of Artificial Sequence: Synthetic polynucleotide
  source 1..452: mol_type = other DNA
gaagacttagcaggtggtgctggatctgcaggtggttacggtgagggcgcaggtgcaggtgtcagatcaggcgctggagcctccgccggagctgccggtggttatggaagagctacaggtgcaggtgcaggaggagcagccgcagccggcgcttcaggatatggaggtagctacggagcaggtgccggagctggtgccgcaggtgcgggtggagcatctgcttatggagctggtattggaggtggttatggagcaggcgccgctgatgcctatggtggtggtgcttccgctggagccggtgccggtgcaggagcaggcgtttcaggtggatatggaagagcagctggtgctggagccgctgctgcagctggtgcaaacggctacggtggtagctatgatgctggagtgggcgcaggtacagcaggtgccggtgctggtgcaggtacgtcttc

SEQ ID NO: 753 - DNA, 479 bp, synthetic construct
  misc_feature 1..479: note = Description of Artificial Sequence: Synthetic polynucleotide
  source 1..479: mol_type = other DNA
gaagacttagcaggtgcctcaggaggctacggaggaggtgcaggtgagggagctggagctgccgctgcagcaggagctggtgcaggaggtgccggtggatacggtggaggtgctggatccggagccggagcagttgccagagctggcgcaggaggtgcaggaggatacggatctggtataggcggaggttacggttctggtgcaggtgccgcagcaggtgctggcgcaggtggtgctggagcatatggaggaggatatggaacaggagctggtgccggagctaggggtgcggattctgccggcgcagccgccggatatggaggaggcgttggaactggtacgggttcatcggccggatacggtaggggtgccggagctggagcaggcgcgggtgctgccgctggatccggtgcaggtgctgcaggaggttacggtggaggctacggagcaggcgctggtgctggcgcaggtacgtcttc

SEQ ID NO: 754 - DNA, 419 bp, synthetic construct
  misc_feature 1..419: note = Description of Artificial Sequence: Synthetic polynucleotide
  source 1..419: mol_type = other DNA
gaagacttagcaggtgccggcggtgcaactggaaaccgtgctggtgacgccttcgcccaggtattcagtcagaatgttattaacagtggagtaattacatcaaccaccgttactaagaattctgcccaggctgctgcatcttctatggtatccacagcggcgaaaagtttgggtttagatgagaataccgcccggtccatggcaaacgctatgtctagctacgctgcagctatggctaagagttttagaaattccgacgaatttataagaaatatgtcataccagatgggaagaatgcttagcaacgctggtgctatcaatgagtctactgcctccgccgcagcaagttctgcatcctcaactgttactgaaacagtgcgcacctacggtccagcagccatattttcaggtacgtcttc

SEQ ID NO: 755 - DNA, 563 bp, synthetic construct
  misc_feature 1..563: note = Description of Artificial Sequence: Synthetic polynucleotide
  source 1..563: mol_type = other DNA
gaagacttagcaggtgcaggtgccggtggagccggcggttacgctcagggatatggagccggtgccggtgctggtgcaggtgctggtaccggagctggaggagctggtggatacggtcaaggttatggcgctggttcaggagcgggagcaggtggtgcaggtggttacggagccggagcgggtgctggagcaggtgctggaggagcatcaggttatggacaaggttacggagatggagctggtgctggtgccggcgctgctgccgcagcaggagccgctgctggagctagaggagcaggtggatacggaggtggtgccggagatggagcaggagccggtgctggtgccggagctgctggtggttacggacagggatacggagctggtgagggtgcaggtgctggagctggcgccggtggcgccggaggatatggtgctggtgctggagctggaggcgctggcggttacggacaatcttacggtgacggagcagccgcagctgctggatcgggtgctggagctggtggatctggcggatacggtgctggagcaggtacgtcttc

SEQ ID NO: 756 - DNA, 569 bp, synthetic construct
  misc_feature 1..569: note = Description of Artificial Sequence: Synthetic polynucleotide
  source 1..569: mol_type = other DNA
gaagacttagcaggtgcaggtgctggtgcaggtgcaggttcaggtgctggtgctgcaggtggctatggtggtggtgctggcgcgggagttggcgcaggtggagcaggtggatacgatcagggttatggagccggtgccggtgcaggatccggtgctggagctggcggcgctggtggttacggaggaggtgctggtgcgggagcagatgcaggtgccggtggtgcaggtggatacggaggtggagcaggcgctggagctggcgcgagagctggagctggaggcgttggaggttatggccaatcttatggcgccggcgcaggtgccggagcaggtgttggtgccggtggtgctggagccggaggtgccgatggatatggccagggttatggtgctggagcaggtacaggagctggagatgctggaggatacggaggtggtgctggtgctggagcttccgcaggcgccggaggatatggcggcggagcaggtgctggtggtgttggtgtttatggcaaaggatacggttccggttctggagccggagcagctgccgctgcaggtacgtcttc

SEQ ID NO: 757 - DNA, 419 bp, synthetic construct
  misc_feature 1..419: note = Description of Artificial Sequence: Synthetic polynucleotide
  source 1..419: mol_type = other DNA
gaagacttagcaggtgcgggaggtgccacaggtaatcgtgccggcgacgcctttgctcaagtcttttctcaaaatgttataaactctggtgtgataacatcgaccactgttactaagaactccgcgcaggccgcggcctcttcaatggtttccaccgcggctaagagcttaggtttggatgagaacactgcacgatcaatggctaacgctatgtcgtcgtacgctgcagccatggccaaatccttcagaaacagtgacgagttcataagaaatatgtcatatcaaatgggaagaatgctcagtaacgctggagctataaacgagtccactgctagcgcagctgcttcctcagcaagctcgactgtgactgagacggtacgtacttacggcccggccgccatattctcaggtacgtcttc

SEQ ID NO: 758 - DNA, 671 bp, synthetic construct
  misc_feature 1..671: note = Description of Artificial Sequence: Synthetic polynucleotide
  source 1..671: mol_type = other DNA
gaagacttagcaggtgccggagctggtggcgctggtggttatgcacaaggttacggagctggtgcaggagcaggtgctggtgccggaacaggtgcaggtggtgctggtggttacggtcaaggttacggagcaggatccggcgcgggtgcaggaggagctggtggatatggtgctggtgctggagccggtgctggagccggagatgcctccggatacggtcaaggatatggagatggagcaggagctggtgctggagctgctgctgcagcaggtgccgctgctggtgctagaggagccggaggctacggaggtggtgctggagctggagcgggtgccggtgccggagctgccggaggttatggacagggttacggtgcaggtgccggagaaggagcaggtgccggcgccggtgccggtgccgttgccggtgcaggagctgctgctgctgctggagcaggtgccggtgctggaggtgccgaaggttacggtgctggcgctggtgctggcggtgccggtggttacggtcagagctacggagatggagccgcagctgcagccggctctggcgctggtgcaggtggatcaggcggatacggtgctggtgcaggcgccggatctggtgctggagcagctggcggttatggtggtggagccggtgcaggtacgtcttc

SEQ ID NO: 759 - DNA, 665 bp, synthetic construct
  misc_feature 1..665: note = Description of Artificial Sequence: Synthetic polynucleotide
  source 1..665: mol_type = other DNA
gaagacttagcaggtgtgggtgccggaggagaaggcggttacgaccaaggatatggcgctggagcaggagcaggcagcggaggtggtgctggaggtgctggtggttacggtggaggtgccggtgcaggatctggcggtggagctggtggtgccggtggttatggtggaggcgccggagctggagcaggcgctggcgccggaggcgcaggaggatacggtggtggcgccggagcgggaactggtgcacgcgccggtgcaggtggtgtcggaggatatggacaatcctatggcgccggagcctctgccgctgccggtgcaggtgtaggagcaggaggtgctggtgctggtggagcaggtggttatggacaaggatacggtgcaggtgctggtatcggagctggtgacgccggaggctacggtggtggtgccggagccggtgcctcagctggtgctggaggatatggaggtggtgctggcgcaggagctggaggagttggtggctatggtaaaggttatggagccggttctggagctggagctgcagccgccgctggcgctggagcgggatctgccggtggatatggcagaggagacggtgctggagctggaggcgcttctggctatggccagggttacggcgccggtgccgccgcaggtacgtcttc

SEQ ID NO: 760 - DNA, 722 bp, synthetic construct
  misc_feature 1..722: note = Description of Artificial Sequence: Synthetic polynucleotide
  source 1..722: mol_type = other DNA
gaagacttagcaggtgctggaagaggttacggtggtggatatggtggtggtgctgctgctggcgctggtgcaggtgcaggagcaggtagaggatacggtggcggttatggcggtggtgctggtagtggagctggaagcggagcaggtgcaggtggtggctctggatacggcaggggtgccggcgctggtgctggcgcaggagctgctgctgcagccggagctggagctggaggtgctggaggttacggaggtggtgctggtgccggagcaggcgcttctgctgccgctggcgcaggtgcaggagccggaggcgcaggaggatatggaggaggttatggaggaggtgctggagcgggagctggcgcaggtgcggccgctgcagccggtgcaggtgctggtgctggtgcaggacgaggatatggaggtggatttggaggaggtgcgggatcgggtgcaggagcaggagcaggagctggaggtggttcaggatacggtagaggtgctggcggttacggaggtggatacggtggtggagctggtactggtgccggcgcagcagccgccactggagctggtgccggtgctggagcaggaagaggttatggcggaggctacggaggaggcgctggagcaggagctggtgcgggagcaggcgccggaggaggatctggatatggtagaggagcaggtgctggagcgtcagttgctgcaggtacgtcttc

SEQ ID NO: 761 - DNA, 452 bp, synthetic construct
  misc_feature 1..452: note = Description of Artificial Sequence: Synthetic polynucleotide
  source 1..452: mol_type = other DNA
gaagacttagcaggtggtcaaggtgaccaaggttaccgagtccaaggcggctacggtcctgttagtaatgctgctgcctcggccgcagctgctgcaagcgctggtggtggtcaaggagcaggacagggaggatatggacccagttctggagctgcagcagcttcagcagctggcgattcgggtggaagaggtggacgacagggttacgttggcggagccggcgcaggtgccggatcgggtgctggcggacaaggaggtcaaggtcagtacggaccaggaacgaatggagctgctgctgccgcggcagcctctgctgcctcagctggaggttccggctctcaagtttctcaggatgtagatcaaggatacggaggaggtgctggtctaggaggctctggatctggttctggtgccgctgctgctgcggcagccgctgctgcaggtacgtcttc

SEQ ID NO: 762 - DNA, 470 bp, synthetic construct
  misc_feature 1..470: note = Description of Artificial Sequence: Synthetic polynucleotide
  source 1..470: mol_type = other DNA
gaagacttagcaggtggaggttatggaagaggtcaaggtgctggagctggtgttggagctggagccggtgccgcagctggagcagccgctatcgccagagccggtggttacggtcagggagccggaggatatggtcaaggtcaaggagcaggagctgctgcgggtgccgccgctggagcaggcgctggtggctatggtcaaggtgccggtggttatggtaggggccaaggtgcaggtgcaggagcaggtgccggtgccggtgctaggggttacggtcagggtgcaggtgccggcgctgctgccggagccgctgctagcgctggtgctggaggttatggtcaaggtgctggcggttacggccaaggtcaaggtgccggagctgctgctggcgccgctgcttctgccggagctggcggatacggacaaggtgctggaggatacggtcagggtcaaggagcaggtacgtcttc

SEQ ID NO: 763 - DNA, 467 bp, synthetic construct
  misc_feature 1..467: note = Description of Artificial Sequence: Synthetic polynucleotide
  source 1..467: mol_type = other DNA
gaagacttagcaggtgctggagcaggagccggagcaggtgctggtggttatggtcaaggatccggtgctggcgccgcagctggcgcagcagccagtgctggagctggtggctatggccagggtgcaggaggatatggccgtggtcagggtgcttcagcaggtgctggagcaggtgcaggaactggtggatatggacagggagctggtgctggtgctgcagccggagccgctgcgtcggccggagcaggaggctatggtcaaggtgccggtggttatggacaaggaacgggagctggagcaggtggttacggtcaaggaacaggtgccggcgctgccgctggagctggtgcctctgctggagcccgaggctatggtcaacgtgcaggaggttatggtcaaggtcaaggagccggtgctgcagctggagctgccgctggtgccggccgatacggacaaggtacgtcttc

SEQ ID NO: 764 - DNA, 623 bp, synthetic construct
  misc_feature 1..623: note = Description of Artificial Sequence: Synthetic polynucleotide
  source 1..623: mol_type = other DNA
gaagacttagcaggtgctggttatggcgctggtgcgggcgctggtgcaggttacggtgctggtgcaggagccggagccggtgcgggtgcagttgctgcgggtggcgccggcgctggtgcaggaagaggttatggtgcaggagcaggagctggcgcaggtgcagctggaggtgcaggagctggtgcaggtgcaggttatggtgccggcgctggtcgtggatatggtgctggtagtggtgctggagctggcgctggcgctgcaggcggagcaggtgctggtgctggagctggatacggcgccggagctggtgcgggagctggagccgcctcaggagctggagccggtgcaggctatggtgccggagcaggacgtggatatggagcaggagccggtgctggttccggcgccggtgcaggagctggagctgcaggtggcgctggagcaggatacggagccggagctggtgctggagcaggaagtggcgccgctgcagctggtggagcgggagctggagctggctatggagctggagctggtagaggttatggagctggagcaggtgccggttctggtgctggtgctggtgccggtgaagcgggaggagctggtgcaggtacgtcttc

SEQ ID NO: 765 - DNA, 659 bp, synthetic construct
  misc_feature 1..659: note = Description of Artificial Sequence: Synthetic polynucleotide
  source 1..659: mol_type = other DNA
gaagacttagcaggttatggagcaggagccggaaggggttacggtgctggagcaggtgccggagcaggcgcagttgccgcatcaggtgctggcgcaggcgctggttacggagcgggagcaggtgcaggagcaggagcaggttacggtgccggagcgggtcgtggatatggtgcaggagccggagcaggtgctggttcaggagctgcctcaggagctggcgccggagccggttacggtgcaggtgccggtgcgggtgctggctatggtgccggagccggaagtggttatggtaccggagccggagctggtgccggagccgcagctgctggaggtgcaggtgcaggcgcaggatatggagcaggagcaggaaggggttatggtgctggagccggagccggtgctgcatccggtgctggtgcaggtgctggagctggtgctgcttcaggagcaggtgctggaagtggttacggagcaggagcagctgcagctggtggagccggcgctggtgctggtggaggttatggtgctggtgctggccgtggttacggagctggagccggtgccggcgcaggcgcaggttctggctcaggttcggcagctggatacggtcagggttacggatcaggtagcggtgctggtgctgccgcaggtacgtcttc

SEQ ID NO: 766 - DNA, 641 bp, synthetic construct
  misc_feature 1..641: note = Description of Artificial Sequence: Synthetic polynucleotide
  source 1..641: mol_type = other DNA
gaagacttagcaggtgctgcagccagcggagcaggagctggtggtgctggaggatatggtagaggagctggagcaggtgctggtgccggtgccggatctgctgcaggcaacgcttttgcacaatctctttcttctaacttactaagttcgggagactttgtgcagatgatttcgtccacaacttctaccgaccaagccgttagtgtggcaacctcagttgctcaaaacgtaggaaatcaattgggtctagacgcaaacgcaatgaattctctgctgggagctgtttcaggctacgtatctactttaggaaatgcgatcagtgatgcttccgcatatgctaacgctatatcgtcagctattggaaatgttctggccaactcaggatccatctctgaatctaccgcttcatctgctgccagctcagctgcttcgtctgtgactacgacacttacttcttatggtccagcagtgttttacgcaccaacttcttctgctggcggttacggtggattggttggttatggagctggtgctggagcagctgcaggcgcaggagccggtgccggcggtgctggaggttacatcggccagggtggatatggcgctggtgccggagccgcggccgcagcaggtacgtcttc

SEQ ID NO: 767 - DNA, 458 bp, synthetic construct
  misc_feature 1..458: note = Description of Artificial Sequence: Synthetic polynucleotide
  source 1..458: mol_type = other DNA
gaagacttagcaggtggttacggagctggtgctggtgccgttgccgctgctggcgctgctggagctggaggttacggtcgaggcgcaggaggatatggtggtcaaggcggatatggagctggcgccggtgcaggcgctgcagccgccgccggtgcgggtgctggaggagcaggtggatatggacgtggagctggagctggcgcaggagcagccgctggtgcaggagctggcgccggaggagctggctatggcggacaaggtggttacggtgccggagccggtgccggagctgcagcagcagctggagcgggtgctggtggtgccggaggctatggtagaggagcaggtgctggtgctggcgctgccgcaggcgcaggagccggtggttacggtggacagggtggatatggagccggcgctggagcaggtgctgctgcagctgcagcaggtacgtcttc

SEQ ID NO: 768 - DNA, 473 bp, synthetic construct
  misc_feature 1..473: note = Description of Artificial Sequence: Synthetic polynucleotide
  source 1..473: mol_type = other DNA
gaagacttagcaggtgctggatcaggcggagccggaggttatggtaggggtgccggtgccggtgccggcgccgccgctggtgcaggagccggtgcaggatcttatggaggacaaggtggttatggtgcgggagctggagcaggtgccgcagctgcagcgggagctggtgctggtgccggtggatacggtcgaggagctggtgccggagctggagctggagccggtgctgctgcaagagcaggagccggagctggaggtgcaggatacggcggccagggtggatatggagccggtgccggtgctggtgctgctgccgctgctggcgctggcgccggtggtgcaggaggatacggtagaggagcaggtgcaggtgctggtgctgcagcaggtgctggagccggagcaggtggttacggtggacaaagcggctacggtgcaggagcaggtgcagctgctgcagcaggtacgtcttc

SEQ ID NO: 769 - DNA, 482 bp, synthetic construct
  misc_feature 1..482: note = Description of Artificial Sequence: Synthetic polynucleotide
  source 1..482: mol_type = other DNA
gaagacttagcaggtgctggcgccggcggagctggaggttatggacgaggcgccggagcaggtgccggagctgctgctggagcaggtgctggtgctgctgcaggtgcgggcgcaggtggttacggtggtcaaggcggctacggagctggtgccggagcaggtgctgctgcagctgctggcgccggagcaggaggcgctggaggatacggaaggggcgctggtgctggagctggtgtcgcagcaggtgcaggcgccggaggatacggtggacaaggtggatatggagccggtgcgggagcgggagcagcagctgccgcagctactggtgcaggtggtgctggtggttatggtcgtggagctggtgctggagcaggagctgcagcaggagctggagccggtactggtggcgctggatacggaggtcagggaggttacggagctggcgccggagctggagctgccgctgctgcaggtacgtcttc

SEQ ID NO: 770 - DNA, 506 bp, synthetic construct
  misc_feature 1..506: note = Description of Artificial Sequence: Synthetic polynucleotide
  source 1..506: mol_type = other DNA
gaagacttagcaggtgcaggagccggaggagctggttatggaagaggtgctggagcgggagctggagcagcagcaggagctggtgcaggagctgctgccggagccggtgccggagccggtggttacggaggtcaaggtggttatggcgcaggagccggagccggcgctgcggctgctgccggtgccggtgctggtggcgccgctggctattccagaggtggaagagctggagcagccggtgcaggtgctggagcagcagctggtgctggagccggagctggtggttacggtggacaaggcggttacggtgctggtgcaggagcaggtgctgcggctgcggcaggtgcaggatcaggtggtgccggcggatatggtaggggcgccggtgcaggagcggccgctggtgctggtgcagcagccggcgctggagccggtgctggaggatatggaggtcagggaggttacggtgctggagcaggagccgctgcagcagcaggtacgtcttc

SEQ ID NO: 771 - DNA, 560 bp, synthetic construct
  misc_feature 1..560: note = Description of Artificial Sequence: Synthetic polynucleotide
  source 1..560: mol_type = other DNA
gaagacttagcaggttatggagcaggtgctggtgcaggtgctggaaccggtggtgccggaggatatggacgcggtgtcggagccggagccggagctggagctggtgccggtggagctggaggatatggtggtggacaaaactacggtgcgggagctggtgctgccgccgcagcaggagcaggcgctggtgcaggtggcgcaggtggctacggaaggggcgccggagcaggagctggcgccgctgctggtgctggtgctggagctgctgctggagctggtgctggtggtgccggaggttacggtacaggccaaggatatggagaaggagcgggcgctggtgccggtgtaggagcaggcggtgcaggtggttacggcagaggtgcaggtgccggtgctggagctggagccggcggatacggtgccggccagggttacggtgctggagcaggagcaggtgctgctgctgcagccggagcaggagccggagccggtggtgccggtggatatggacgtggagctggtgcaggagcaggtgcaggagccgctgcaggtacgtcttc

SEQ ID NO: 772 - DNA, 515 bp, synthetic construct
  misc_feature 1..515: note = Description of Artificial Sequence: Synthetic polynucleotide
  source 1..515: mol_type = other DNA
gaagacttagcaggtgccggagcgggaggtgccggaggatacggagccggtcaaggatacggtgccggcgccggcgcaggagcagctgccggagccggtgctggaggagctagaggttacggagcgagacaaggatacggcagtggtgccggtgcaggtgctggagcaagagctggtggagccggaggatacggtagaggagccggagccggtgcagctgccgcctcaggagctggtgctggaggatacggcgctggtcaaggttatggagccggtgctggcgcagtggcctccgctgctgccggtgccggatccggagcaggaggcgctggtggctatggaagaggtgccggagctgtagccggcgctggagctggtggtgctggtggttacggcgctggcgcaggtgctgctgcaggagtaggtgcaggaggaagcggaggttacggtggacgtcaaggcggttattctgctggtgctggtgcgggtgcagcagccgctgcaggtacgtcttc

SEQ ID NO: 773 - DNA, 569 bp, synthetic construct
  misc_feature 1..569: note = Description of Artificial Sequence: Synthetic polynucleotide
  source 1..569: mol_type = other DNA
gaagacttagcaggtggtgctggaggatatggtgtaggccaaggttatggagcaggagcgggtgccggcgctgccgcaggtgctggagctggaggcgctggtggatatggtgcaggacagggttacggagctggagccggcgtaggagctgctgctgcagctggagccggagccggtgttggcggagctggcggatatggccgaggagcgggagccggtgctggagcaggtgcaggagcagccgcaggagcaggagcaggtgctgcagccggagctggtgccggcggagcaggtggatatggagcaggacaaggttatggcgctggtgccggtgtaggagcagctgcagctgcaggagctggagctggcgtcggtggagccggtggttacggtagaggcgctggcgcgggagccggagctggagcgggaggtgctggaggttacggcagaggcgctggtgctggcgctggtgctggagccggtgccggtggagcaggtggttatggagctggccaaggttacggagctggtgctggagctggcgctgcagccgcggcaggtacgtcttc

SEQ ID NO: 774 - DNA, 623 bp, synthetic construct
  misc_feature 1..623: note = Description of Artificial Sequence: Synthetic polynucleotide
  source 1..623: mol_type = other DNA
gaagacttagcaggtgctggagctggagcaggaggtgcaggcggatacggtagaggtgctggagccggagcgggagctggtgcaggagctggtggagctggtggttacggtgctggccaaggatacggagctggtgccggagctggagccgccgccgctgccggtgcaggagccggtgctggaggagctggaggttacggtagaggagcaggagcaggtgcaggagcaggcgctggagccggaggtgccggtggatacggtgccggacaaggctatggcgcaggtgcaggtgcaggagctgctgctgccgccggagctggtgctggagctggaggcgctggtggttatggaagaggcgctggtgcgggagccggcgctggcgcaggcgccggtggagctggaggatacggaagaggagctggtgctggtgcgggcgctggtgctgccgctggagccggagcaggtggtgctggaagatacggcgccggacaaggttacggtgctggtgctggagcaggcgctgctgccggtgcaggtgctggtggtgcaggaggttatggtgcaggtcagggttatggagctggagctggtgccggtgcagctgctgcggcaggtacgtcttc

SEQ ID NO: 775 - DNA, 581 bp, synthetic construct
  misc_feature 1..581: note = Description of Artificial Sequence: Synthetic polynucleotide
  source 1..581: mol_type = other DNA
gaagacttagcaggtgctggtgccggtgtcggaggtgcgggtggatacggaagtggtgctggcgccggagctggtgccggtgcaggagctgcctcaggcgccgcagctggtgctgctgctggtgccggtgccggtggcgcaggcggatacggtacaggacagggttacggtgccggagcaggagccggtgcaggcgccggtgcaggcggtgctggtggatacggtcgaggcgctggtgctggtgccggagctggtgctggtggtgccggtggctatggcgccggtcaaggttacggagccggtgcaggtgctggtgccgctgctgctgctggagatggcgcaggagctggaggcgctggtggttatggtagaggagctggcgccggtgctggcgctggtgcagctgctggagctggagcaggtggtgctggtggatatggagccggacaaggttatggtgcaggtgctggagccggtgctgctgcaggagctggtgcgggaggagctggaggatatggcgctggacaaggatatggtgctggagcaggtgctggtgctgcagccgctgcaggtacgtcttc

SEQ ID NO: 776 - DNA, 569 bp, synthetic construct
  misc_feature 1..569: note = Description of Artificial Sequence: Synthetic polynucleotide
  source 1..569: mol_type = other DNA
gaagacttagcaggtgctggtgctggtgtcggtggcgctggtggttatggtagaggcgcaggagcaggtgctggagctgctgccggagcaggagccggtgctgctgccggagctggtgcgggaggagctggtggatacggtactggtcaaggatacggcgctggcgccggagcaggtgcgggtgctggaggtgctggtggttatggaagaggtgctggagctggagctggagccggtgcgggagccggcggtgcaggtgaatatggagccggtcagggatacggagctggagcaggcgcaggagctgctgctgctgctggcgcaggagctggtgccggaggtgctggaggttacggacgaggtgctggtgcaggtgcaggtgcaggagcggctgctggagccggagctggaggtgctggcggttacggtgctcgccaaggttacggagctggtgccggcgctggtgccgctgctggagccggtgcaggtggagcaggtggctacggtgctggtcaaggttatggagctggtgctggtgctggtgcagccgcagctgcaggtacgtcttc

SEQ ID NO: 777 - DNA, 503 bp, synthetic construct
  misc_feature 1..503: note = Description of Artificial Sequence: Synthetic polynucleotide
  source 1..503: mol_type = other DNA
gaagacttagcaggtgcaggcgcaggcgctggtggagccggtggttacggtagaggagctggtgccggagccggtgcaggagccggagctgcagcaggacagggatatggttcaggagctggagcaggagccggtgcttctgcaggaggagctggtagttacggaagaggcgcaggagctggagctgcagccgcaagtggagctggtgcaggaggttacggtgccggtcagggatacggcgccggtgccggagccgttgctagcgctgctgccggagctggatcgggtgctggaggcgctggtggatatggtagaggcgccgtagctggatctggtgccggtgctggagccggagcaggtggtgctggaggatacggagcgggagccggtgccggtgctgcagccggcgctgtagccggtggaagtggaggatacggtggtcgtcaaggaggttactccgcaggtgctggcgccggagcagcagccgccgcaggtacgtcttc

SEQ ID NO: 778 - DNA, 599 bp, synthetic construct
  misc_feature 1..599: note = Description of Artificial Sequence: Synthetic polynucleotide
  source 1..599: mol_type = other DNA
gaagacttagcaggtgctggtgccggagccggtggagcaggaggattcggacgtggcgccggtgctggcgctggtgccggcgctggcgctgcagctggtgcaggcgccggaggagcaggcggatacggagctggtcaaggatacggcgcaggagctggtgcaggtgccgccgctgctgctggcgctggagcgggtgcgggtggtgcaggtggttacggcagaggtgccggtgccggtgctggtgccggtgctgctgcagctgctggagcgggagctggcggagcaggaggttacggagcgggccagggttatggagccggtgctggagccggagccgcagcagctgctggtgcaggagctggaactggaggagcaggtggttatggcgctggtcaaggctacggagctggagctggcgcgggagctggcgctggagcaggagcaggagcaggtggtgcaggtggatatggtagaggtgcaggagccggcgccggagccggagccggagctggtggagcaggtggatatggcgtaggtcaaggatacggtgctggagcaggtgctggtgcaggtgcaggatccgcagcaggtacgtcttc

SEQ ID NO: 779 - DNA, 407 bp, synthetic construct
  misc_feature 1..407: note = Description of Artificial Sequence: Synthetic polynucleotide
  source 1..407: mol_type = other DNA
gaagacttagcaggtaacgcattcgcacagagtttgtcatccaacctcctttcttcaggtgactttgttcaaatgatctcgacaaccacttctaccgaccaagcagttagtgttgcaacttctgttgctcaaaacgtaggaaaccaattgggtctagatgcgaatgctatgaacaacttgttggccgcagttggtggttatgtgtcctcattgggaggtgccgttgcagacgctgctgcttacgccaatgcaattagctcagccatcggtaacgttctcgcaaatacgggctctattaatgaatcaacagcaagttccgcagcttcgagcgccgcttcatccgtcactactaccttgacttcatacggacctgcagtgttctacggaagaggtgcaggtacgtcttc

SEQ ID NO: 780 - DNA, 458 bp, synthetic construct
  misc_feature 1..458: note = Description of Artificial Sequence: Synthetic polynucleotide
  source 1..458: mol_type = other DNA
gaagacttagcaggtgctggtgcaggtggcggctatggaggtggatatggtgcaggtggaggagcaggagctggagccggcgcgggtgctggtgccggagccggtgctggtgctggtcgtggtggagcaggaggatatggcgctggagcaggtgccggtgccggtgccgctgccgcagctgctgccggagccggagccggaggaggatatggaggaggatatggtgctggcgttggcgcgggcgctggtgcaggtgccggagctggtggtggttacggaggtggttatggagctggcgctggtgctggagctggtgctgctgctgctgcagctgcgggtgctggtgcaggcggaggttacggtggcggatacggtgcaggcggaggagcaggagcgggagccggagcaggagctggtgcaggtgcaggtgccggtgcaggtagaggaggtacgtcttc

SEQ ID NO: 781 - DNA, 464 bp, synthetic construct
  misc_feature 1..464: note = Description of Artificial Sequence: Synthetic polynucleotide
  source 1..464: mol_type = other DNA
gaagacttagcaggtgctgtgggttatggagctggagcaggtgcaggagctgcagcagcggctgcagcgggagctggagctggaggcggttatggtggtggttatggtgctggtggtggtgctggagctggagctggtgcgggagccggtggcggatacggtggtggatatggagctggtggtggcgcaggagccggagctggagcaggcgctggtgcaggtagaggaggtgctggaggatacggtgccggtgctggagcagcagctggtgcagctgctgccgccgcagccggtgctggagctggtggaggctatggaggaggatacggagctggaggtggtgccggtgcaggtgctggagcagctgctggagcaggtgccggcgcaggtaggggaggagctggaggatatggagccggagccggtgcaggagcaggtgcagccgctgctgcaggtacgtcttc

SEQ ID NO: 782 - DNA, 419 bp, synthetic construct
  misc_feature 1..419: note = Description of Artificial Sequence: Synthetic polynucleotide
  source 1..419: mol_type = other DNA
gaagacttagcaggttcaggtgctggcgccggttctggatacggcgctggtgctggagctggtgcaggctctggttatggagcgggttctagtgctagtgcaggctctgctattaatactcaaacagttacgagtagtactacgacttcatcacaatcatctgccgctgcaactggtgctggttacggtacaggtgctggcaccggagcctcagctggtgccgcagccagtggcgctggtgccggatacggaggacaagctggatacggtcaaggagctggagctagcgctagagctgccggatccggttacggagctggagcaggcgcggctgcagctgcaggttccggctatggtgctggtgccggtgctggagccggttcgggttatggcgctggagctgctgcaggtacgtcttc

SEQ ID NO: 783 - DNA, 545 bp, synthetic construct
  misc_feature 1..545: note = Description of Artificial Sequence: Synthetic polynucleotide
  source 1..545: mol_type = other DNA
gaagacttagcaggtagtggatacggagcaggcgcaggtgctggtgccggcagtggttacggtgccggagccggtgctggaagcggttatggcgcaggagctggagctggtgctggctcaggctacgttgccggagcaggagcaggtgcaggtgctggttctggatatggagctggagcaggcgctggagctggttcctcatattccgctggtgcaggagccggtgctggttctggttatggcgctggtagttctgcttctgccggctcagccgtctcaacacaaactgtttccagttcagcaacgacctcgtcacagagtgccgcagctgctactggagcagcatacggtacccgagcatcaactggaagtggtgcttctgctggagctgcagcatcaggtgctggagctggttacggaggtcaggccggttatggtcaaggaggaggagctgcagcctatagagctggcgcaggatcccaggccgcttatggacaaggtgcctcgggctcatctggtgcggcagctgcagcaggtacgtcttc

SEQ ID NO: 784 - DNA, 527 bp, synthetic construct
  misc_feature 1..527: note = Description of Artificial Sequence: Synthetic polynucleotide
  source 1..527: mol_type = other DNA
gaagacttagcaggtgcaggagctggatacggaggtcaagtcggttacggccagggtgctggcgcctcagcaggtgccgccgcagctggagccggcgccggatatggaggacaggctggttacggacaaggagccggtggatccgctggtgcagcagcagctggcgctggtgctggtagacaagcaggttacggtcagggtgcaggagcatctgctcgtgcagcagccgctggagctggcacgggatatggtcagggtgccggtgcatccgctggagccgcagcagctggtgctggtgctggttcccaggtgggatacggacaaggtgctggtgcatcctccggtgctgctgctgctgcgggtgctggtgcaggatacggcggtcaagttggttacgagcaaggcgcaggagcttcagctggagctgaagccgcagcttcatcagctggtgccggatatggtggtcaggccggttatggacaaggcgctggcgcctctgcaggtgcagcagccgcaggtacgtcttc

SEQ ID NO: 785 - DNA, 617 bp, synthetic construct
  misc_feature 1..617: note = Description of Artificial Sequence: Synthetic polynucleotide
  source 1..617: mol_type = other DNA
gaagacttagcaggtgccggtgctggatatagaggtcaggccggttacatacagggagctggtgcctctgctggtgcagctgctgctggagctggcgtaggttatggtggacaagccggctatggtcagggcgccggcgcctctgcaggagccgcggccgcagccggtgctggtgctggcagacaagctggatatggccagggcgctggagcatcagctggagctgccgcagcgggagccggtgctggtagacaggcaggttacggtcaaggtgcaggagcctccgccggagctgctgcagcaggagctgatgctggttatggcggacaagccggttacggacaaggagcaggagcttctgcaggcgcagcagcatcaggtgcaggagctggttatggtggccaagctggctatggtcaaggcgctggtgcttctgccggtgctgcagctgctggcgctggagctggctatctaggacaggctggatacggacagggtgctggagcttctgctggcgccgctgccggagcgggtgccggatatggtggtcaggcaggttatggacaaggtactggagcagcagcttctgccgctgcctcaagtgcaggtacgtcttc

SEQ ID NO: 786 - DNA, 560 bp, synthetic construct
  misc_feature 1..560: note = Description of Artificial Sequence: Synthetic polynucleotide
  source 1..560: mol_type = other DNA
gaagacttagcaggtggtcctggaggtccaggtggaccaggtggagcttatggtcctggagctggcggacctagcggtcctggaggagcaggtcctggaggtgttggaccttacggtccaggaggagttggtcctggaggagtcggtccgggaggtgcaggagtaggtcctggaggagctccaggtgcaccaggaggcccaggtggccctggaggtcctggaggtcctggtggagtcggaggacctctgggtgcaggtgcaggtggagtcggacctggaggagcgggagcttatggacctggaggtgccggagcatacggacctggaggagtaggacttggtggtgctggcgcttacggtcccggaggagctggaccaggaggcgcaggtccacacggtcctggcggacctggtggagcaggtccaggaggtgaaggacctgtgacagttgatgttgaagtatctgtcggtggcgctcccggaggcggatcaggaggtgttggaccaggaggagcaggagtcggaccaggtggtgctccaggtgccccaggtacgtcttc

SEQ ID NO: 787 - DNA, 827 bp, synthetic construct
  misc_feature 1..827: note = Description of Artificial Sequence: Synthetic polynucleotide
  source 1..827: mol_type = other DNA
gaagacttagcaggtggcgcaccaggtggtggaccaggaggtgccggtccgggcggtgccggatttggacccggaggaggagccggattcggccctggaggaggtgccggtttcggcccaggaggtgctgccggaggaccaggtggtcctggtggacctggaggtccaggtggagctggtggatacggtccaggaggagctggaggatacggaccaggaggtgtcggtcctggtggagctggaggatatggacctggaggtgctggaggttacggtccaggaggttccggtccaggtggtgccggaccgggtggtgccggtggcgagggtccggttactgtagacgttgatgttactgttggacctgaaggagtgggaggaggaccaggtggcgccggtccaggaggtgcaggattcggcccaggtggcggagcgggtttcggtccaggtggcgcccctggagccccaggaggaccaggaggtcctggaggaccgggtggtccaggaggtccaggaggtgtaggaccgggtggagctggaggttacggccctggtggtgctggtggagtaggaccggctggtactggaggattcggtcctggaggagccggtggttttggacctggtggagcaggaggttttggtcctggaggagcaggtggattcggaccaggaggtgctggaggatatggtccaggtggtgttggtcctggtggtgcaggaggttttggacctggaggagttggtccaggaggatcaggacccggaggagctggtggtgaaggaccagtaacagtagatgtagacgtctcagtaggtacgtcttc

SEQ ID NO: 788 - DNA, 827 bp, synthetic construct
  misc_feature 1..827: note = Description of Artificial Sequence: Synthetic polynucleotide
  source 1..827: mol_type = other DNA
gaagacttagcaggtggagctcctggtggtggtccaggaggagctggtcctggtggagccggatttggtccaggtggtggcgcaggttttggcccaggtggtggagctggatttggaccaggcggagctgctggcggtcctggtggtccaggtggaccaggaggtccgggaggagcaggaggttacggaccaggtggcgccggaggctacggaccaggcggcgttggtccgggtggcgctggtggatacggacccggaggagctggaggatatggtccaggaggttctggacccggcggcgccggtcctggaggagcaggtggagagggacctgtgactgtagacgtggatgtgacagttggtcctgaaggtgttggaggaggcccaggaggtgcaggccctggaggtgccggtttcggtccaggtggtggtgcaggattcggacctggcggtgcaccaggagccccaggtggcccaggtggtcctggaggtccaggaggacctggtggacctggtggtgttggacctggaggtgcgggcggttatggaccaggtggagcaggaggagtaggaccagcaggtactggtggctttggccctggtggtgccggtggtttcggcccaggaggtgctggtggtttcggacctggtggtgcaggaggatttggtccagcaggtgctggcggttacggacctggtggagttggacccggcggtgctggaggattcggaccgggaggagttggcccaggtggttcgggtcctggtggagctggaggagagggtcctgttaccgtcgatgtagacgtttctgtaggtacgtcttc

SEQ ID NO: 789 - DNA, 827 bp, synthetic construct
  misc_feature 1..827: note = Description of Artificial Sequence: Synthetic polynucleotide
  source 1..827: mol_type = other DNA
gaagacttagcaggtggtgcccctggtggaggaccaggtggagctggcccaggaggtgctggttttggaccaggtggaggagctggatttggacctggtggtggagccggcttcggaccaggtggagcagccggtggtccgggtggtccaggaggtccaggtggaccaggaggagctggtggttatggccctggaggtgctggaggatatggtccaggcggtgtgggtccaggtggagctggtggctatggtcccggtggcgctggcggatacggaccaggtggaagcggccctggaggcgccggaccaggtggtgccggtggtgaaggaccagtcaccgtcgacgtagacgttactgttggacctgagggagtcggtggaggacccggcggtgccggtccaggaggcgccggtttcggtccaggaggaggtgccggtttcggccctggtggagccccaggagctccaggcggccctggaggtccgggaggtcctggaggaccaggaggtccgggtggcgttggaccaggtggtgcgggaggttatggtccaggtggagccggtggatttggtcctggaggcacaggcggatttggacctggaggcgctggtggttttggacctggtggcgcaggaggatttggtcctggcggtgccggaggattcggtcctggtggagctggaggatacggtccaggaggtgttggtccaggaggtgctggaggtttcggaccaggcggtgttggacctggaggaagtggtcccggcggtgccggaggtgaaggcccagttactgtggatgtcgacgtttctgtaggtacgtcttc

SEQ ID NO: 790 - DNA, 593 bp, synthetic construct
  misc_feature 1..593: note = Description of Artificial Sequence: Synthetic polynucleotide
  source 1..593: mol_type = other DNA
gaagacttagcaggtgttagttacggacctggaggtgcaggtggtccttatggtccgggtggtccttacggaccaggtggagaaggtccaggtggagcaggaggaccttatggccctggtggtgttggaccaggaggcagtggtcctggaggttacggacctggtggagcgggcccaggaggatatggacctggcggatctggacctggcggatatggacctggtggatcaggacctggaggttatggcccaggaggaagtggtccaggcggatacggacctggtggttccggtccaggtggttacggaccaggaggatatggcccaggtggatctggtccgggcggatcgggacctggaggtagcggacctggaggatatggtcctggcggtactggtccaggtggttcaggcccgggaggttacggtcctggaggttcgggtccaggaggatctggtccaggcggttatggtccaggtggtagtggacctggaggatttggaccaggtggttccggacctggaggttacggtccaggaggatcgggtcctggaggcgcaggaccaggtggagtaggtccaggtacgtcttc

SEQ ID NO: 791 - DNA, 713 bp, synthetic construct
  misc_feature 1..713: note = Description of Artificial Sequence: Synthetic polynucleotide
  source 1..713: mol_type = other DNA
gaagacttagcaggtggatttggaccaggtggtgctggacccggaggcgctgcaccaggtggtgccggtcctggcggtgccggtccaggtggagccggccctggaggcgccggtccaggaggcgccggtcctggtggcgcgggtccaggtggagctggaggtgcaggaggtgctggtggcagcggtggtgccggaggatctggtggtactacaataattgaagatctggatatcacaattgacggcgcggatggccctattactatttctgaagagcttcctatttctggagccggtggatctggtcctggtggcgctggtcccggaggagttggaccaggaggatctggaccaggcggagttggtccaggtggttccggtccaggcggagttggacctggtggttcgggccctggaggtgtgggtccgggcggtgctggaggcccctatggtccaggaggatccggtcctggcggagctggtggagcaggaggtccaggtggtgcttatggacctggaggatcctacggacccggaggttcaggtggtccaggaggagcaggaggcccttatggtcctggaggagagggtcctggaggcgctggtggtccttacggtccaggaggtgcaggtggtccttatggtccaggtggagcaggcggtccatacggaccaggaggagaaggcggtccatatggcccaggtacgtcttc

SEQ ID NO: 792 - DNA, 653 bp, synthetic construct
  misc_feature 1..653: note = Description of Artificial Sequence: Synthetic polynucleotide
  source 1..653: mol_type = other DNA
gaagacttagcaggtggatcttacggacctggaggcgctggcggaccatatggacctggcggtccatatggtccaggtggagagggacctggtggtgctggtggaccatatggaccaggaggtgtcggtccaggaggaggaggtcctggcggttatggacctggtggcgcgggacctggaggctacggaccaggtggatctggtcccggcggttacggaccaggtggtagcggccctggtggatatggtcctggtggctccggtccgggtggttatggtccaggtggttctggccctggtggttatggaccaggtggttccggtccaggtggctcaggccctggaggatacggacctggtggctcaggtcctggaggaagcggacctggtggctatggcccaggaggtagtggtcccggcggatatggtcctggaggatcgggaccaggtggctcaggaccaggaggttatggtcctggaggttcgggacctggtggttctggtccaggtggttacggaccaggaggatcaggacctggaggattcggtccaggaggatttggaccaggaggctcaggaccaggtggatacggcccaggcggttctggtccaggaggcgccggcccaggtggtgttggtccaggtacgtcttc

SEQ ID NO: 793 - DNA, 722 bp, synthetic construct
  misc_feature 1..722: note = Description of Artificial Sequence: Synthetic polynucleotide
  source 1..722: mol_type = other DNA
gaagacttagcaggtggatttggtccaggtggcgcaggccctggaggtgcaggccctggtggagcaggtcctggtggagctggccctggaggtgccggccctggaggagcaggtccaggtggcgctggacctggcggcgctggacctggtggagccggtggtgctggcggtgctggcggtgccggaggatcaggaggcgcgggaggcagcggtggaactactattatcgaagatttagacatcaccattgatggagctgatggccctatcacaatttccgaagaattgactatatccggtgcaggtggcagtggaccaggaggagctggtcctggtggagttggaccaggtggaagcggacctggtggtgttggcccaggtggtagtggtcctggaggagttggtccgggaggatccggacccggaggtgtcggtcctggtggagccggaggtccatacggaccgggtggatccggacctggcggcgccggtggagctggaggacctggtggtgcatatggaccaggtggatcctatggaccaggaggaagtggtggccccggtggagctggtggcccatacggaccaggaggcgaaggaccaggtggagcaggtggcccttacggaccaggtggtgccggaggtccttacggtcctggtggcgccggaggtccatatggtccaggcggtgaaggtggcccttatggtccaggtacgtcttc

SEQ ID NO: 794 - DNA, 563 bp, synthetic construct
  misc_feature 1..563: note = Description of Artificial Sequence: Synthetic polynucleotide
  source 1..563: mol_type = other DNA
gaagacttagcaggtggtagctatggtccaggtggagctggaggtccttacggaccaggtggtccatacggccctggtggagaaggtccaggaggtgccggtggtccttatggacctggcggagttggcccaggtggaggcggtccaggaggttacggtccgggaggtgccggaccaggcggatacggacctggcggatcaggaccaggtggatacggccctggaggctcaggaccaggaggatacggcccaggtggatccggccctggtggttacggccctggaggatcaggacctggtggatatggtccaggtggtagtggtcctggtggttcaggacctggaggttacggtccaggtggttccggtccaggaggctatggtccaggaggatccggtcctggaggatccggaccaggcggctatggacctggaggttcaggtccaggtggattcggacctggaggttttggacctggaggatcaggtccaggaggttatggtccgggaggatcgggtcctggtggtgctggaccaggaggtgtaggaccaggtacgtcttc

SEQ ID NO: 795 - DNA, 722 bp, synthetic construct
  misc_feature 1..722: note = Description of Artificial Sequence: Synthetic polynucleotide
  source 1..722: mol_type = other DNA
gaagacttagcaggtggttttggacctggtggagctggaccaggaggagccggacctggtggtgcaggcccaggaggagctggaccaggtggtgctggtccgggtggtgccggtccaggaggtgctggtcctggtggagcgggtccaggtggagcaggaggtgctggtggagctggaggagctggaggtagcggtggtgcaggaggttctggaggaacaaccatcatcgaagatttagatatcactatcgatggagctgacggcccaatcacaatatccgaggaacttacaatctctggagccggtggatcaggtccgggtggtgctggacctggtggtgtaggacctggtggatcaggaccgggtggtgttggacccggaggtagcggtccaggaggcgttggtcctggtggctcaggagccggtggagtgggtccaggaggtgccggaggaccttatggtcctggtggatctggaccaggtggagctggaggcgcaggaggacctggaggtgcctatggtcctggaggttcgtacggaccaggtggatcgggtggtcctggaggagcaggaggaccttacggtcctggtggtgaaggtcctggaggtgctggtggtccatacggcccaggtggagctggtggtccttacggacctggtggagccggaggtccttatggtccaggtggtgaaggaggaccatacggcccaggtacgtcttc

SEQ ID NO: 796 - DNA, 878 bp, synthetic construct
  misc_feature 1..878: note = Description of Artificial Sequence: Synthetic polynucleotide
  source 1..878: mol_type = other DNA
gaagacttagcaggtgcaggtggttcaggaccaggtggtgctggtccaggaggcgctggcccaggtggagctggacctggtggtgccggacctggtggcgctggtcctggaggagttggaccaggcggtgccggtggacctggaggtgctggtggtccatttggtcctggaggttctggacctggcggagctggaggagcgggtggtccatacggtcccggtggagcgtatggccctggaggaccaggtggaccaggaggaccaggcggaccaggttctggtggaccatacggaccaggaggtgcctatggtccaggtggagcttacggtcctggcggtgcttacggaccaggtggtgcaggcggaccaggtggagcaggtggcccatacggtcctggaggtccttatggacctggcggaccatatggacctggtggtgcaggtggtccaggcggagctggtggtccatatggcccaggcggagcaggtccaggaggatatggccctggcggagcaggaccaggaggttacggacctggtggaagtggtccaggtggtgcgggtccaggtggatatggtcctggtggatccggtcctggaggtgccggacccggaggctatggtccaggcggtgctggacctggaggatatggcccaggaggagctggtccaggaggtgcaggtccaggtggagccggtccgggaggatatggacctggcggaagcggtccaggtggtcctggtagtggtggtcctggtggtgctggtggttctggtggtactactgtcatcgaggacctggatattactgtaaatggcccaggcggacctattaccattagcgaagaattgaccgtcggaggcccaggtacgtcttc

SEQ ID NO: 797 - DNA, 830 bp, synthetic construct
  misc_feature 1..830: note = Description of Artificial Sequence: Synthetic polynucleotide
  source 1..830: mol_type = other DNA
gaagacttagcaggtgcaggtggctcaggccctggtggagcaggacctggaggtgccggtcctggaggcgctggacccggcggtgttggaccgggaggagctggaggacctggtggagccggcggtccatttggaccaggtggttccggaccaggtggcgctggtggcgctggtggtccatacggccctggcggagcttatggtccaggtggccctggtggtccaggtggtcctggtggcccaggctctggtggtccttacggaccaggtggagcttacggaccgggtggagcatatggtccaggaggagcatatggaccaggcggagccggaggtccatacggaccaggtggtccttacggccccggaggaccttacggtcccggtggtgcaggtggacccggaggcgccggtggtccatacggacccggtggtgctggtccgggtggatacggtccaggaggcgcaggtccaggaggttatggaccaggcggttctggacctggaggtgcaggacccggtggatatggacccggtggatccggacctggcggagccggacctggtggatatggacctggtggtgcaggtccaggcggttacggacctggtggcgctggacctggcggtgctggtcctggaggtgctggacctggcggatatggcccaggtggttctggtcctggaggacctggttcaggaggaccgggtggagccggaggatcaggcggtacaacagtcatcgaagatttagatattaccgtcaacggcccgggcggaccaatcacaatttctgaagagttgactgtaggaggtccaggtacgtcttc

SEQ ID NO: 798 - DNA, 887 bp, synthetic construct
  misc_feature 1..887: note = Description of Artificial Sequence: Synthetic polynucleotide
  source 1..887: mol_type = other DNA
gaagacttagcaggtgcaggtggatctggtccaggaggtgccggtccgggcggagctggtccaggcggcgcaggaccaggcggtgctggtcctggcggtgctggtcccggaggagttggacccggtggagctggtggtcctggtggagctggaggtcccttcggacctggaggaagcggaccaggaggagcaggaggtgcaggaggaccttacggaccaggtggcgcctatggacctggcggtccaggaggccctggaggacctggcggaccgggtggccctggatccggtggaccatatggcccaggtggtgcgtacggccctggtggagcatatggtcctggaggagcatatggaccaggtggtgctggtggacctggcggcgcagcaggtccctacggaccaggcggaccatatggtccaggtggtccgtacggaccaggtggtgcaggcggacctggtggtgctggaggaccatacggtcctggaggtgcgggacctggcggttatggtccaggcggtgcaggtcctggcggatatggtccaggtggatcaggaccaggaggagccggacctggaggatatggacctggtggttcaggtccaggtggagccggacctggtggatacggccctggtggtgccggacctggaggctacggacctggaggagctggcccaggaggtgccggaccgggtggagctggacctggtggttacggtccaggaggttctggtccgggtggtcctggtagtggaggaccaggtggtgccggtggaagcggtggcactacagttattgaagatctagatattaccttaaatggacctggaggtcctataacgatctccgaagagctgactgtaggaggaccaggtacgtcttc

SEQ ID NO: 799 - DNA, 554 bp, synthetic construct
  misc_feature 1..554: note = Description of Artificial Sequence: Synthetic polynucleotide
  source 1..554: mol_type = other DNA
gaagacttagcaggtgcaggtggttctggcccaggtggtgctggtccaggaggagtgggaccaggacgttcaggccctggaggtgttggaccaggaggctctggtccaggttctgttggtcctggaggatctggacaaggaggtttgggcattggtagaagtggccctggcggtgttggcccaggtggttcaggaccaggatctattggacctggaggtagcggtcagggaggtcttggtcctggtggttcaggtcagggtggtttgggcccaggaggttcaggacctggaggagttggctccggcggagttggaggaccatacggtccaggtggatctggcccaggaggagtgggtggagcaggaggaccatatggtccgggcggtagcggtggaccaggtggagctggaggaccatatggacctggtggaccttatggtcctggtggtgctggaggaccttacggccctggcggagcaggtggaccttacggaccgggtggtccatacggccctggtggtgctggcggtcctggtggaggaggtacgtcttc

SEQ ID NO: 800 - DNA, 596 bp, synthetic construct
  misc_feature 1..596: note = Description of Artificial Sequence: Synthetic polynucleotide
  source 1..596: mol_type = other DNA
gaagacttagcaggtccaggaggtgccggtggtccatatggaccgggaggaccaggtggcgcgggtcctggtggctacggtccaggaggatatggaccaggtggtgctggtccaggtggagcaggaccgggaggctatggaccaggtggagccggtcctggaggatatggtccaggaggtgcaggtcctggcggtagcggtcctggtggcataggtccaggtggatccggaccaggaggatacggtccaggtggaattggcccgggaggaactggccccggtggtgctggacctggtggtgcaggtccaggtggtgctggcccatccggtgctggtcctggtggcgctggtccatcaggtgccggaagaggtggttccggtaggggttcggttggccgaggtggcgccggcagaggtggagccggtagaggaggtgcaggaggagcaggcggatccggaggcgcaggtggctctggcggtgccggcggatctggaggaacaacaatcatcgaggaccttgatattaccgttgatggagctaatggtccaattactattagtgaagaactaactataggtggtgcaggtacgtcttc

SEQ ID NO: 801 - DNA, 608 bp, synthetic construct
  misc_feature 1..608: note = Description of Artificial Sequence: Synthetic polynucleotide
  source 1..608: mol_type = other DNA
gaagacttagcaggtgccggaggtgtaggtcccggaggttctggcccgggaggtgtaggacctggcggatcaggacctggtggtgtcggacctggaggatccggtccaggcggagttggctctggaggatcaggacctggaggtgttggacctggtggatccggtcctggcggtgtcggatccggaggtttcggtccaggtggtattggaccaggaggtagtggtcccggtggagttggtcctggaggagtcggaggaccatatggaccaggcggatcaggccctggtggagctggtggagcaggcggatcttacggtccaggcggaccatatggcccaggcggtagtggaggacccggtggtgccggtggaccatatggtccgggaggtgcaggaggcccttacggaccgggaggaccttatggtcctggaggagcaggtggtccaggtggcgagggaccgggtggcgcgggaggtccgtatggaccaggaggaccaggaggtgccggtcctggtggttatggtcctggtggtgctggtcctggaggatatggacctggaggagctggcccaggaggttacggacctggtggtgcaggtacgtcttc

SEQ ID NO: 802 - DNA, 671 bp, synthetic construct
  misc_feature 1..671: note = Description of Artificial Sequence: Synthetic polynucleotide
  source 1..671: mol_type = other DNA
gaagacttagcaggttctggaggttacggaccaggtggtgcaggtccaggaggctatggacctggtggccctggacctggtggctatggtccaggtggtgcaggccctggtggttacggaccaggaggtactggacctggtggatccgccccgggcggtgcgggcccaggtggtgctggcccaggtggatacggtcctggaggttccggtccaggtggttatggaccaggtggtggaccaggaggtgccggcccaggtggagcaggtccaggaggtgctggccctggcggagcaggtcctggaggtgccggccctggaggtgccggtcctggtggagctggtccaggaggtgccggacctggtggagccggccctggtggagctggcccaggaggagtgggaacaggtggactgggaagaggcggagctggaaggggaggagctggaagaggaggtgccggtcgaggaggtgccggacgaggaggtgcaggtcgtggtggaacaggtggagttggtggagccggtggcgctggaggagctggtggtgtcggtggagctggtggatccggaggtactaccgttattgaagatttagacataactattgatggtgccgacggtccaattacaatatctgaggagttgacaatttccggtgcaggtacgtcttc

SEQ ID NO: 803 - DNA, 617 bp, synthetic construct
  misc_feature 1..617: note = Description of Artificial Sequence: Synthetic polynucleotide
  source 1..617: mol_type = other DNA
gaagacttagcaggtgccggaggaagtggtccaggaggtgcaggtcctggaggtgtcggtccaggtggatcaggacctggaggtgttggtcctggaggttcaggccctggtggtgttggtccaggaggagcgggcggtccatataggccaggcggatctggacctggaggagcaggaggtgcaggtggtcctggcggagcatatggtccaggaggatcaggaggtcctggtggagctggtggcccgtacggccctggtggagaaggtccaggtggcagtggcggcccatacggaccgggaggagaaggaccaggtggtgctggaggcccatatggtccaggcggcgctggcggtccatacggtccaggaggagctggaggaccatatggtccaggtggagctggtggaccatatggcccaggtggtgccggtggcccttatggaccaggtggagccggtggcccatacggccctggtggtgcaggaggaccttatggacctggtggagagggtccaggtggagcaggtggtccttacggacctggaggagttggtccaggtggaaccggtccaggaggttatggtcctggcggtgccggcccaggaggtacgtcttc

SEQ ID NO: 804 - DNA, 647 bp, synthetic construct
  misc_feature 1..647: note = Description of Artificial Sequence: Synthetic polynucleotide
  source 1..647: mol_type = other DNA
gaagacttagcaggttatggacctggaggatccggtccaggaggctacggccctggtggttctggtcctggtggttttggaccgggtggatctggaccaggtggatacggacctggtggaagtggaccaggaggatacggtccgggaggttctggacctggtggtgctggacctggtggttacggacctggaggaaccggtcctggaggatcaggacctggtggatacggtccaggaggtagcggacctggtggatatggtcctggtggtagtggaccaggtggttatggccctggaggatcgggcccgggtggtgccggtccaggtggcgctggaccaggtggagccggacctggtggagctggaccaggaggagttggtccaggtggtgcaggtcctggaggatctggacctggcggagctggtccaggaggagcaggaagaggtggagcaggccgtggaggcgcaggtcctggaggtgctggacccggtggagctggtggagcgggtggagccggaggatccggtggagcaggcggaagcggaggaactaccgttatagaggacctggatataactattgatggagctgacggacctatcacaatctcagaagagttgactattaatggcgcaggtacgtcttc

SEQ ID NO: 805 - DNA, 572 bp, synthetic construct
  misc_feature 1..572: note = Description of Artificial Sequence: Synthetic polynucleotide
  source 1..572: mol_type = other DNA
gaagacttagcaggtgctggtggttctggaccaggaggcgccggccctggtggtgtaggccctggtggatcgggaccaggtggagtaggaccaggtggaagtggaccaggcggagtgggaccaggtggagctggaggtccttatggacctggaggctctggacctggcggagctggtggtgctggcggccctggaggagcatacggtccaggcggttcgggtggtccaggaggagctggcggaccttatggtccgggaggcgaaggaccaggtggtgctggtggaccatacggtcctggaggtgaaggtcctggaggtgctggaggtccatacggtcctggtggtgcaggaggaccatatggtcctggaggtgccggtggcccttacggccctggaggtgcaggcggtccatacggtccaggtggcgctggaggtccatatggcccaggaggtgttggaccgggaggaactggtccgggtggctacggacctggcggtgctggtccaggcggttatggtcctggaggatcaggtcctggaggttacggtccaggaggatcaggtacgtcttc

SEQ ID NO: 806 - DNA, 626 bp, synthetic construct
  misc_feature 1..626: note = Description of Artificial Sequence: Synthetic polynucleotide
  source 1..626: mol_type = other DNA
gaagacttagcaggtcctggtggatatggacctggcggttcaggaccaggaggatttggaccaggtggttctggtcctggaggatctggtccaggtggctcgggtcctggaggatatggtcctggaggttctggtccaggtggatacggtcccggtggttctggcccaggtggttacggaccaggcggatctggtccaggaggctatggtccaggtggatccggaccaggaggaagtggccctggaggatacggtccaggtggaagcggaccaggtggttatggacctggtggatccggacctggaggagcgggacctggaggtgctggcccaggtggagtcggtccaggaggtgcaggtcctggcggagccggtcctggtggagttggtcccggtggcgctggtcctggtggtgctggaccaggtggtgcaggacctggtggagctggccgtggtggtgccggaccaggcggtgctggtggtgccggtggagctggtggatctggtggagctggtggtagtggtggaactacagtaattgaggatttggatataaccatcgacggtgctgatggaccgattactattagcgaagaacttaccatcggtggtgcaggtacgtcttc

SEQ ID NO: 807 - DNA, 647 bp, synthetic construct
  misc_feature 1..647: note = Description of Artificial Sequence: Synthetic polynucleotide
  source 1..647: mol_type = other DNA
gaagacttagcaggtatcaatgtcgattccgacataggttctgtaacctcgctcatactgtcaggtagcactctacaaatgactataccagccggtggtgatgatcttagcggaggttaccctggaggattcccagctggagcacaaccgagtggtggcgctcctgttgatttcggcggaccatcagctggcggtgacgttgctgcaaagctggctagatctttggcatctacattggcctcatcaggtgttttcagagcagcgtttaattccagagtatcaacacctgttgctgttcagtttacagatgccctagtgcagaaaatcgcctccaatcttggactggattacgctacggctagtaagctgcgaaaggcatcccaggctgtctccaaggtcagaatgggaagtgacactaacgcctacgccctggctatttcttcagctttagctgaagtattgtcctcatccggaaaagtcgcagacgctaatattaatcagattgctcctcagctagcctcaggtatcgttttaggagtttctactacggccccacagtttggagtagacttgagctcaattaatgttaatctcgacatttccaatgttgctcgcaatatgcaagccagcatacaaggtacgtcttc

SEQ ID NO: 808 - DNA, 527 bp, synthetic construct
  misc_feature 1..527: note = Description of Artificial Sequence: Synthetic polynucleotide
  source 1..527: mol_type = other DNA
gaagacttagcaggtggtccagccccaattaccgctgaaggcccagatttcggtgcaggatatccaggaggagctcctacagatttgagtggattggatatgggtgctccctccgatggctctcgcggaggagatgctaccgccaaactattgcaagctctagttccagcactgcttaaatccgatgtgtttagagcaatctacaagagaggcactagaaaacaagtcgtacagtatgtcactaattctgctctccaacaagccgcctcttcacttggtctggatgcatcaacaatatctcagctacagacaaaggctactcaagctttgtctagtgtgagcgctgattctgactctaccgcatacgctaaggcctttggtttggcaattgctcaagtgttgggaacctctggacaagtaaacgatgcaaatgttaaccagattggtgccaagttagccactggtattctcagaggatcttccgctgtcgcccccagactgggtattgacctgtcaggtacgtcttc

SEQ ID NO: 809 - DNA, 647 bp, synthetic construct
  misc_feature 1..647: note = Description of Artificial Sequence: Synthetic polynucleotide
  source 1..647: mol_type = other DNA
gaagacttagcaggtatcaacgtcgattcagatataggatccgtaacatctcttatcttaagtggttctactttgcaaatgaccattccggcaggaggagatgacctgagcggtggatatcctggtggatttccagcaggagctcagccatctggtggtgctccagtagattttggaggaccatcggcgggtggtgacgtcgctgcaaaacttgcccgttctctcgcttcgaccctggcctccagtggagtatttcgtgctgctttcaacagcagagtttcaactccagttgcagtgcaactgaccgatgcgttggtccaaaagatcgcctcaaatcttggcttggattacgctactgcatcgaagctccgtaaggcatctcaggctgtttctaaggtccgcatgggatcagatactaacgcatacgctttggctatctcatcagcattggcagaggttttgagttcctcaggtaaagtcgctgacgccaacattaatcagatcgctccgcaacttgcttctggaatcgtcttaggcgtttcgaccacagcacctcaatttggagttgatttaagttctataaacgtgaacttggatatttccaatgtcgctaggaacatgcaagccagcatacaaggtacgtcttc

SEQ ID NO: 810 - DNA, 527 bp, synthetic construct
  misc_feature 1..527: note = Description of Artificial Sequence: Synthetic polynucleotide
  source 1..527: mol_type = other DNA
gaagacttagcaggtggacctgctccaatcaccgctgagggtccagactttggagctggatacccaggtggcgcccctactgaccttagtggattggacatgggtgccccttcagatggatcgcgcggtggtgatgcaaccgctaaattgcttcaagctttagtgcccgcacttctaaaatccgatgtattcagagcaatatataagagaggaacgagaaaacaagtagttcaatacgttacgaactcggcgttacaacaagctgctagttctttaggtttggatgcctccacgatttcccagttgcaaactaaggccacccaagccttatcttcggttagcgctgactccgattctactgcctatgccaaagcttttggactggccattgctcaggtactaggaacttcaggtcaggttaatgacgctaacgtgaatcaaatcggagcaaaactcgcaactggtattttgcgtggatcatctgctgttgctcctagattgggaatcgacctatcaggtacgtcttc

SEQ ID NO: 811 - DNA, 647 bp, synthetic construct
  misc_feature 1..647: note = Description of Artificial Sequence: Synthetic polynucleotide
  source 1..647: mol_type = other DNA
gaagacttagcaggtatcaacgttgattccgatattggaagtgtgactagtctgattttgtccggctccacattgcaaatgaccattccagccggtggtgacgacctgagcggaggttacccaggcggattgcctagcggcgctcaaccaagtggtggtgctcctgtggattttggtggaccatctgcaggtggagatgtcgcggcgaaactggcgagatcattggctagcactttggcctctagtggtgtttttagggcagctttcaactcccgtgttagcacacctgttgctgtccaactaacagatgcactggtgcagaagatcgcaagtaatttaggacttgattacgccaccgcctcaaaattgagaaaagcatctcaggctgtatctaaggtgcgcatgggttctgacacaaatgcatacgcactggctatttcttcagccttggctgaagtgctatcaagttccggaaaggtcgcagacgccaatattaaccaaattgcaccgcagctagcatctggaatcgttttgggtgtcagtaccactgcaccccaatttggtgttgacctatcttcaattaatgttaacctggacatctctaacgtggctcgcaatatgcaggcatccattcaaggtacgtcttc

SEQ ID NO: 812 - DNA, 527 bp, synthetic construct
  misc_feature 1..527: note = Description of Artificial Sequence: Synthetic polynucleotide
  source 1..527: mol_type = other DNA
gaagacttagcaggtggtccagcacctattaccgctgagggtcctgactttggtgcaggatatcccggtggcgcacctactgacttaagcggactcgatatgggagctccatctgatggatccagaggaggtgacgccacagccaagctattacaggccctcgtaccagcgcttctaaagtctgatgtttttagagccatatacaagagaggaactcgtaagcaagttgtgcagtacgtaactaactcggctcttcaacaagcagcgtcgtcgctaggtctagacgccagtaccatttctcagttgcagactaaagccacgcaagctttgtcatcagtatcagctgattcagactctaccgcttatgctaaggcttttggactggcaatcgctcaagttttgggtacctcaggccaagtgaacgacgctaacgttaatcagataggtgctaaattggcaactggcatattaagaggtagcagcgctgtcgcgcctaggctgggcattgacttgtcaggtacgtcttc

SEQ ID NO: 813 - DNA, 647 bp, synthetic construct
  misc_feature 1..647: note = Description of Artificial Sequence: Synthetic polynucleotide
  source 1..647: mol_type = other DNA
gaagacttagcaggtatcaacgtcgacagtgatattggaagtgtaacgagcttgatcttgagcggtagtaccttacaaatgactatccctgccggtggtgacgacctcagcggtggctacccaggaggattcccagctggagctcagccttcaggaggtgctccagtcgattttggaggaccatctgctggaggtgacgtcgctgctaaattggccagatctctggcctcaactctggcatcgtctggagtatttagagcagcatttaattccagagtatccacacctgttgctgtacaactgacagatgctctcgtccaaaagattgctagcaatcttggactagactatgctactgcctcaaagttgagaaaggcgagtcaagctgtcagcaaagttagaatgggttctgatactaatgcctatgcactagcgatcagctccgcattagccgaggttttgtcatcttcgggtaaggtcgccgatgcaaacattaaccaaatcgctccacaattagcttctggaattgtgctaggagtcagtaccacagctcctcaattcggcgtggatttatcatctattaatgttaaccttgatatatcgaatgtcgcgaggaacatgcaagccagcattcaaggtacgtcttc

SEQ ID NO: 814 - DNA, 527 bp, synthetic construct
  misc_feature 1..527: note = Description of Artificial Sequence: Synthetic polynucleotide
  source 1..527: mol_type = other DNA
gaagacttagcaggtggtccagcaccgattacagctgaaggacctgatttcggtgctggatacccaggaggagctccaaccgatctaagcggcctcgacatgggagccccatctgacggttctagaggtggagacgctacagccaaactattgcaggctctcgttcctgccttactaaagtctgacgtttttagagcgatatataagagaggtacacggaagcaagtggtgcaatacgttaccaactccgctttgcagcaggctgcttcttcgttgggtttagacgcatccactatttcacaattgcagacgaaggcaacacaggccctttcctctgtcagtgccgattcggatagcaccgcctacgcaaaggctttcggtttggctattgctcaggtgctaggtacttctggacaagtcaacgacgctaatgtgaatcagattggagctaaattggctaccggtattcttagaggatcttctgccgtagcccctagattgggcatagacctttcaggtacgtcttc

SEQ ID NO: 815 - DNA, 647 bp, synthetic construct
  misc_feature 1..647: note = Description of Artificial Sequence: Synthetic polynucleotide
  source 1..647: mol_type = other DNA
gaagacttagcaggtattaacgtcgattcagacatcggttctgtgacaagtttaatattgtctggttccactttgcaaatgaccataccagctggcggtgacgatctgagtggcggctaccctggcggattcccatctggtgctcaaccttccggaggagctcctgttgattttggaggtccatctgctggtggtgatgttgcagctaaattagcacgatctctagcatctacgttggcatcgtccggcgtatttagggcggcttttaactctagagtgtcaacacctgttgctgtacaattaaccgatgctctcgtgcagaagatcgccagtaacctgggtttggactatgcaactgcttcgaaactaagaaaggcttctcaagcggttagcaaggtccgcatgggctccgacaccaacgcctatgcattggcgatatcaagtgcactcgctgaggttttgttgagctctggaaaggtagcagacgccaacattaaccagatcgctcctcaactcgcctcaggcatagttttaggtgtttctactgcagcaccacagtttggcgttgacttatcaagcattaatgtgaacctggatatctctaacgtggccagaaacatgcaagcaagcatacaaggtacgtcttc

SEQ ID NO: 816 - DNA, 527 bp, synthetic construct
  misc_feature 1..527: note = Description of Artificial Sequence: Synthetic polynucleotide
  source 1..527: mol_type = other DNA
gaagacttagcaggtggacctgccccaataacggctgaaggacctgattttggtgctggttaccctggcggtgcacctactgatctgtcaggactggacatgggtgccccatccgacggcagtaggggaggcgacgctacagctaaactattgcaggctctggtgccggcgctgttgaagagtgacgtttttagagctatttataaaagaggtacacgaaaacaagtcgtgcagtatgtcactaattctgctttacaacaggccgcatcttccttgggcctggacgcttctactatatcccagttgcaaacaaaagcaacccaagcattgtcctccgtttctgctgattccgactctacagcatatgctaaagcatttggtttggcaattgcccaagttctgggtactagcggtcaggtaaatgatgctaacgtaaatcagatcggagcaaaacttgccaccggtatattgagaggttcctcagctgttgcccctagactaggaattgatttgtcaggtacgtcttc

SEQ ID NO: 817 - DNA, 668 bp, synthetic construct
  misc_feature 1..668: note = Description of Artificial Sequence: Synthetic polynucleotide
  source 1..668: mol_type = other DNA
gaagacttagcaggttcttccgccggacttgtaagcagagtcgcaaatgcattggctaacaccagtacattacgcgctgttctgcgaaggggtgtaagtcaacagactgcttcctccgtcgtgcagagagccgttcaatcccttgccggaacgctaggagttgatggaaattccttgtccagaattgccctgcaagcaattagtcaattgcctggtggtagtgatacttctgcatacgcccaggctttctcatctgctttattcaacgcaggtgtattgaacgcttcaaacatagacactttgggttcgagggttttgtctgccgttctgaacggtgtctcttctgccgcccaaggtattggactcaacgttgatacaggttctgtacaaagcgacatttcttctagttcatcttttttatcaagtagtagttcgtcggcaagtttcagccaaacctccgcttcgagcacctctggtgccggttatacagccccagctggaccgtctggatacactggtccttccggaccatccggatacacgggtccggtaggaggtgctgctcaatttggatctgtttcaggtcaaacatctttcggacaaacatcaggatttactgcaagtaccggcggacaggctgctttcggtgcaacctcaggtacgtcttc

SEQ ID NO: 818 - DNA, 668 bp, synthetic construct
  misc_feature 1..668: note = Description of Artificial Sequence: Synthetic polynucleotide
  source 1..668: mol_type = other DNA
gaagacttagcaggttctagtgccggattggtcagtagagtcgctaatgcattagctaatacaagtacattgagagcggtcttgcgaagaggcgtatctcaacagacagcctcctccgtggtccagagagctgtccaatctcttgcaggcacgttgggagttgacggaaacagtctttcaagaattgctttgcaagctattagtcaattgccagctggtagtgacacttcagcatatgctcaagcgttcagttccgcattagttaatgctggtgttttgaacgcctctaacattgacacattgggttcacgcgtcctaagtgcagtgcttaacggcgtttcatccgctgcgcaaggaataggattaaacgtcgataccggcagtgtccagtctgatatctcaagttctagctcttttttgtccagttcgtcgtccagtgcttctttttcacagaccagcgccagtagcactagcggcgctggttatactggacctagtggaccttcaggatatacaggtccagccggtccatccggatataccggtcctgttggcggtgctgctcagttcggttcggtaagtggacagacttctttcggacaaacctctggttttacagcttctacgggaggacaggccgccttcggtgctacttcaggtacgtcttc

SEQ ID NO: 819 - DNA, 668 bp, synthetic construct
  misc_feature 1..668: note = Description of Artificial Sequence: Synthetic polynucleotide
  source 1..668: mol_type = other DNA
gaagacttagcaggttcttcagctggattggtgtctagagttgccaacgcattggcaaacacatctacactcagggctgtcctgagacgtggagtgtccccacaaacagcctcatccgttgttcaacgtgcagttcagtctttggcaggtacactgggtgtcgatggaaattcgctctctagaattgccctccaagccatctcccaactgccagctggttctgacacgtctgcatacgcccaggccttttccagtgctttggtaaatgccggagtgctctccgcctctaatattgataccttgggttcaagagttttaagtgctgtcttgaacggagtctcctcagctgcccaaggtataggcttgaacgtcgatacaggatccgttcaatctgacatcagttctagtagctcatttctatcatcttcatctagctcttcctcaatttcccaaacttctgcatcttcgacatcaggtgcgggttataccggtcccgcaggtccaagtggatacacaggaccatcgggtccgtcaggatatacgggacctgtgggaggtgcggcacagtttggctcagtatctggtcaaacgagcttcggtcagacaagcggattcaccgcctcaaccggtggacaggctgcctttggtgcgacctcaggtacgtcttc

SEQ ID NO: 820 - DNA, 668 bp, synthetic construct
  misc_feature 1..668: note = Description of Artificial Sequence: Synthetic polynucleotide
  source 1..668: mol_type = other DNA
gaagacttagcaggttcttctgcaggacttgtttcccgagttgctaatgccctggctaacacatccactttaagggctgtgctgagaagaggagtctcgcaacaaacagcctcaagcgtcgtccaaagagccgttcagtccttggccggaactctgggtgttgatggtaactctcttagccgtatcgctttacaagctatctctcaattgccagcaggatccgatacctccgcttacgcccaggccttctcttcggctctggttaacgccggcgttttgaatgctagtaacattgatacgttgggtagcagagttttgagcgctgtactgaacggtgtaagcagtgccgcccagggaattggactcaacgtcgactcaggctcgattcagagcgacatttcatcatcctctagctttttgtcatcatcgagttcctcgtcctcaatttcccaaacatctgcatcaagtacatccggtgcaggatatactggacctgctggtccgtcaggctacacaggcccatctggtccatcaggttacacaggacccgtaggtggagccgctcagtttggatcggtgtcaggtcagacatcttttggtcaaacttctggatttaccgctagtactggcggacaagcggcctttggagctacgtcaggtacgtcttc

SEQ ID NO: 821 - DNA, 632 bp, synthetic construct
  misc_feature 1..632: note = Description of Artificial Sequence: Synthetic polynucleotide
  source 1..632: mol_type = other DNA
gaagacttagcaggtggaggtgtcggaagcctcaccggtcagacttcttttggccagactagcggcttcacgagtactgcgggagcacaaggcggtttcggcccaacaaccggcgcccaaagtgcattgatttctaggattgcaaacgccttggcaaatacttcaacgttaaggtccgtactacgtaccggcgtctctcagcaaaccgcctcaagtgtggttcagcgaactattcaaactcttgcttccaatttgggtatagatggcaataatctatcaaggatagcactgcaagctatttcgcaagtaccagcaggttctgatacatcagcctatgctcaagcgttctcaactgctttagtcactggaggagtgttaaacgcaaacaacgtcgataccctaggtagtcaagttctaagtgctgtgctcaacggagtttcatcggccgctcaaggactgggaataaatgtggacaccggatctgtacagagtgacattagatcatcatcctcttctttgtccacatcttcttcctctgcatctttcagtcaaacttccggagccgcttctaccactggttttactggcgctggtggatacccaggaggagctggaccattaggtacgtcttc

SEQ ID NO: 822 - DNA, 632 bp, synthetic construct
  misc_feature 1..632: note = Description of Artificial Sequence: Synthetic polynucleotide
  source 1..632: mol_type = other DNA
gaagacttagcaggtggaggtgttggatctcttacaggacaaacgagtttcggtcaaacctctggcttcacaagtaccgctggagctcaaggaggattcggtccgactacaggtgctcagtccgcattgatcagtcgaatcgccaatgcattggccaatacctctaccttgagatctgtcttgagaactggtgtaagtcaacagacagcatctagtgttgttcagcgagctattcaaacgctagccagtaatttaggtatagatggcaataacttgagtaggattgccctgcaagcaatatcccaagtaccagcaggttctgacacctccgcttatgcacaggctttcagtacagctctggtgactggcggcgttttaaacgccaacaacgttgatactttgggatcacaagtgctgtccgccgtgttaaacggagtttcatcggcagcacagggtcttggtatcaacgtggacactggtagcgttcaatcagatatccgatcatcaagttccagtctgtctacatcttcctcgtcggctagtttctctcagacttcaggtgctgcttctaccacaggttttaccggtgctggtggttaccctggaggtgcaggtcctctaggtacgtcttc

SEQ ID NO: 823 - DNA, 632 bp, synthetic construct
  misc_feature 1..632: note = Description of Artificial Sequence: Synthetic polynucleotide
  source 1..632: mol_type = other DNA
gaagacttagcaggtggaggcgtaggatcattgaccggccaaacaagctttggtcaaacttctggtttcacatcaactgctggtgctcaaggtggcttcggaccaacgacaggagctcaaagcgccttgatctccagaatagctaacgcactggctaacacatctactcttagatccgtcttgcgcacaggagtaagccaacagacagcatcaagtgtagtacagagaacgatccaaacgttggcatcgaacttgggaattgacggcaacaacctctcaagaatcgcattacaggctatatcacaagttccagctggctctgatacctcagcttatgctcaagcatttagtaccgcattagtcacaggcggagttcttaatgcaaataacgtggataccttgggttcccaggtgttgtcagctgtcttgaatggtgtgagctctgccgctcagggacttggtattaatgttgacacaggatccgttcaatccgacattagatcttcttcgtctagtctgtccacatcatcgtcatctgcctctttctcccagacatctggtgcagcttcgacaaccggatttaccggagctggtggttaccctggaggcgctggtccactaggtacgtcttc

SEQ ID NO: 824 - DNA, 632 bp, synthetic construct
  misc_feature 1..632: note = Description of Artificial Sequence: Synthetic polynucleotide
  source 1..632: mol_type = other DNA
gaagacttagcaggtggtggagtaggaagcttgaccggtcaaacttcctttggtcagacgtccggattcactagcactgccggagcccaaggaggattcggcccaacgacaggagctcaatctgcacttatatcgagaattgctaacgcccttgccaatacttcaaccttgaggagtgtgctgagaacgggtgtttcccaacaaaccgcatcctcagtcgtgcaaagagctatccagactcttgcatccaatttgggattggatggcaacaacctctctagaatcgctcttcaagccatttcacaggtaccagcaggcttcgatgcttctgcttatgcacaagctttctcgacggcattagttacaggtggagtgctaaacgctaataatgtagatacactcggctctcaagttttatcggctgttttaaacggtgtctcatctgctgctcagggtttgggtattaacgttgatactggatcagtccaaagcgatataagatctagtagctcgagtttgtctaccagtagtagtagcgcatctttcagccagacttcaggtgctgcttctacaacaggttttaccggagctggtggttaccctggaggagcaggaccactaggtacgtcttc

SEQ ID NO: 825 - DNA, 632 bp, synthetic construct
  misc_feature 1..632: note = Description of Artificial Sequence: Synthetic polynucleotide
  source 1..632: mol_type = other DNA
gaagacttagcaggtggaggagttggttctcttacaggtcagacttcctttggacaaacttcaggttttaccagcaccgcaggagctcaaggtggttttggaccaaccacgggcgcacaatctgccctgatttcaagaattgctaacgcattggctaacacatccactctgagatccgtgctgagaaccggagtttctcaacaaacagcttcatccgttgtccaaaggactattcaaactctcgcatcaaacttgggaattgatggaaataatttgtcgcgtatagccttgcaagcaattagtcaagtgcctgccggttcagatactagtgcatacgctcaggccttttcaacggctttggtcacaggaggagtcttaaacgcaaacaatgtggatacactaggatctcaagttttgagtgccgttttatccggagtatcctcggccgcccaaggcttaggaatcaacgttgatactggcagtgtccagtccgacattagatccagctcatcaagtttaagcacatcaagctcttccgcctccttcagtcaaacttctggagccgcatcaactacgggattcactggtgccggaggatacccgggtggtgctggtccactaggtacgtcttc

SEQ ID NO: 826 - DNA, 632 bp, synthetic construct
  misc_feature 1..632: note = Description of Artificial Sequence: Synthetic polynucleotide
  source 1..632: mol_type = other DNA
gaagacttagcaggtggaggagtgggctccctaactggacacacatctttcggacagacctctggattcacctcaactgctggcgcccaaggaggatttggacctacaactggtgctcaatctgctttgatctcaagaattgctaatgccttggcaaatacttcaactctgagatctgtactgcgtaccggagtttcacaacagattgcctcatcggtagtccaaagaactattcaaactcttgcctctaacttaggtattgatggtaacaacttgtcgcgtatcgcactacaagcaatatcacaggttccagctggaagtgacaccagtgcttatgctcaggcttttagcacagccttagtgacgggcggtgttctaaacgctaacaatgttgacactttaggtagtcaagtgttgagtgctgttttgaacggcgtctcctcagcagcacaaggtttgggaattaacgtggacactggctcagtgcaatcagacataagaagttcatcatcctctttgagcacttcctcatcatcagcaagtttctcacaaacaagtggagctgcctctacaacaggatttacaggtgctggtggctacccgggtggagccggaccattaggtacgtcttc

SEQ ID NO: 827 - DNA, 632 bp, synthetic construct
  misc_feature 1..632: note = Description of Artificial Sequence: Synthetic polynucleotide
  source 1..632: mol_type = other DNA
gaagacttagcaggtggcggagtaggttctctaacaggccaaacatcgtttggccagacttctggttttacatcaacagccggtgcccaaggtggcttcggacctatcacaggcgcccaatctgccctgatatcccgtatcgcgaacgctttggctaataccagtacattacgatccgtgttgcgaacaggtgtttcccaacagactgcttcgtcagtagtgcaacgtacgatacagacacttgcatccaacctcggtattgacggaaataacctgagtagaatagctttgcaggccatcagtcaggtgccagcaggtagcgacacctccgcttacgcacaagcctttagcactgctttggttactggaggtgttcttaatgccaataatgtcgataccctgggttctcaagtactttccgcagtattgaatggagtatcttctgcggctcaaggtttgggtatcaacgtggatacgggatcagttcaaagcgatattcgaagctcctcttcttctctttccaccagttctagtagcgcttcgttttcacaaacatccggcgctgcatccactaccggtttcacaggtgctggaggttatccaggtggagcaggaccattaggtacgtcttc

SEQ ID NO: 828 - DNA, 632 bp, synthetic construct
  misc_feature 1..632: note = Description of Artificial Sequence: Synthetic polynucleotide
  source 1..632: mol_type = other DNA
gaagacttagcaggtggtggtgtcggttcgcttaccggccaaacaagttttggccaaacctctggatttacctccacagcgggtgctcagggaggattcggacctactactggtgcccaatcagctctgatttctagaatcgcaaacgcattggcaaacacatctactttaagatcggtattgcgaactggagtctctcaacaaacggccagctctgttgttcaaagaacgatccaaaccttggctagcaacttgggtatcgatggtaacaacctatcgagaattgctctgcaggccatttcccaagtgccagccggatctgatacttcagcttacgctcaagctttttctacggcacttgttactggaggtgttttgaacgctaacaacgtggacaccctaggatcccaggtcctgtcggcagttctaaacggtgtatcctccgctgcacagggattgggaataaatgttgatactggctcggtacagagtgatatcagaagcagttcgtctagcttaagtacttcttcctccagcgcaagctttagtcagacttctggtgctgcatctacgaccggtttcaccggagctggcggctacccaggaggtgccggtccattaggtacgtcttc

SEQ ID NO: 829 - DNA, 623 bp, synthetic construct
  misc_feature 1..623: note = Description of Artificial Sequence: Synthetic polynucleotide
  source 1..623: mol_type = other DNA
gaagacttagcaggtgcaggttacacgggaccatccggcccatcgactggtccatccggttacccaggtcctctaggtggtggagctccatttggacaaagtggcttcggaggtagtgatggtcctcaaggcggttttggtgccaccggtggtgctagcgctggtttaatctcacgagttgctaacgctttggccaacacttccacactaagaactgtacttagaactggagtgtctcaacagatagcaagtagtgttgtccagagagcagcacaatctcttgctagtactttaggcgttgacggcaataatctcgccagattcgcagttcaagcagtttccagattgcccgctggatctgatacttcagcatacgcacaggcattcagtagcgccctgtttaatgccggtgtgttgaatgccagtaacatcgacaccctaggtagtagagtcctgtccgctttactaaacggtgtaagctcagctgctcaaggtttgggcatcaacgtggattctggttctgttcaaagtgatatttcgtcatcttcaagtttcttgtctaccagcagctcctcggcttcttactctcaagctagtgccagttctacttcaggtacgtcttc

SEQ ID NO: 830 - DNA, 623 bp, synthetic construct
  misc_feature 1..623: note = Description of Artificial Sequence: Synthetic polynucleotide
  source 1..623: mol_type = other DNA
gaagacttagcaggtgcaggttacaccggtccatcaggccctagtactggtccgtccggatatccaggtttgctgggtggaggagctccatttggacaatccggatttggtggaagtgacggtccccagggtggattcggtgctacaggaggagcctcagcaggtttgatttctagagtagcgaacgcattagccaatacctcaactctgagaacggttctaagaactggtgtttcccaacaaatagcttcaagcgtcgtgcaaagggccgcacaaagtcttgctagtaccttgggagtcgacggaaacaaccttgccagattcgctgttcaagctgtttccagactacctgccggttccgatacaagtgcctatgctcaagcttttagttctgcattatttaacgcaggagttttaaacgcctccaatattgataccctcggtagtagagtattaagtgcactgctaaacggtgtcagttccgccgcccaaggtttgggcatcaatgtggactctggatctgttcaatctgacatctcttcatcatcatcttttttgtctacatcttcctcatccgcttcttattctcaggctagcgcatcaagtacctcaggtacgtcttc

SEQ ID NO: 831 - DNA, 623 bp, synthetic construct
  misc_feature 1..623: note = Description of Artificial Sequence: Synthetic polynucleotide
  source 1..623: mol_type = other DNA
gaagacttagcaggtgctggatacacgggcccttcaggtccctctacaggacctagcggttacccaggaccactgggaggtggagctccatttggccagtccggtttcggtggcagtgacggcccccaaggcggattcggagctacaggcggtgcttccgctggtctgatatcccgtgtcgcgaacgctctggcaaacactagtacgttgagaacagttttgcgtactggcgtttcccagcagattgcttccagtgttgtacaacgagcagcccaaagtttagcttccaccttaggagtggatggtaataacctagctcgctttgcggtacaagcagttagccgccttccagcaggttccgacacgtcagcttatgcacaggctttctcatcagccctatttaatgctggagttttgaacgctagtaacatagatacattgggatcgagagtattgagtgctttattgaacggagtatcttcggctgcccaaggtctgggtataaatgtagactccggatcagtacaatcggacatctcttcgtctagtagttttctttctacaagctcttcctccgcttcttattcccaggcttctgcgagttctacttcaggtacgtcttc

SEQ ID NO: 832 - DNA, 623 bp, synthetic construct
  misc_feature 1..623: note = Description of Artificial Sequence: Synthetic polynucleotide
  source 1..623: mol_type = other DNA
gaagacttagcaggtgctggttatactggtccatctggaccttcgacgggtccttctggttaccctggaccactgggaggcggtgcccctttcggacaatccggattcggtggaagtgccggtccacagggtggttttggtgcaaccggtggtgcttctgctggtttaatatcgagagttgccaacgctctggccaacacaagtactttacgaaccgtcctgcgaactggcgtatcccaacagatagcctcttcagtcgtacaacgtgccgctcaatccttggcttcgaccttgggagtggacggtaacaatcttgctagatttgctgttcaagctgtcagtagacttcctgctggaagtgataccagtgcttatgcacaagcattcagtagtgctttgtttaacgctggagtcttgaatgcctcaaacattgatactcttggttcacgtgttctatctgctttattaaacggtgtgagctcagccgcacaaggattaggaataaacgttgattccggaagcgtgcagtcagacatttcctctagctcaagctttttgagtactagtagctcttcagccagttactcccaagcctcagcatcctcaacttcaggtacgtcttc

SEQ ID NO: 833 - DNA, 623 bp, synthetic construct
  misc_feature 1..623: note = Description of Artificial Sequence: Synthetic polynucleotide
  source 1..623: mol_type = other DNA
gaagacttagcaggtgcgggttatactggcccgtcaggtcctagtactggaccatctggttatccaggtccattaggaggtggtgctccatttggacaatctggtttcggaggttcagctggaccacaaggaggctttggtgcaactggaggtgcatccgccggattgatttcaagggtagcaaatgctttggcgaacacctccactcttagaacggttctccgaacaggtgttagtcagcaaatcgctagttccgtggtccaaagagccgcccagagtttggcatcaactttgggagttgatggaaataatttggcgagatttgccgttcaagctgtgtctagactaccggcaggaagcgatacttctgcgtacgcccaagccttctcatccgctttgttcaacgctggagtgttgaatgctagtaacatcgataccctgggcagtagggtcttgtcagcactgctcaatggtgtgtcgagtgctgcccaaggattgggtatcaatgtcgacagtggttcagtccaatccgatatctcttcgtcatcttcatttctaagtacgagctcttcctcagcttcatactcccaagcttcagcttcttccacctcaggtacgtcttc

SEQ ID NO: 834 - DNA, 623 bp, synthetic construct
  misc_feature 1..623: note = Description of Artificial Sequence: Synthetic polynucleotide
  source 1..623: mol_type = other DNA
gaagacttagcaggtactggttacactggacctagtggtccttcaactggaccatcaggatatccaggaccactgggtggtggtgctccctttggacaatctggatttggaggctcagctggacctcaaggcggtttcggtgctactggtggagctagcgctggtttgatttccagagttgccaacgcactggcaaatacatccacattgagaactgtactcaggaccggtgtcagccaacagatcgcttcttcagtcgttcaaagggctgcccaatcattggcaagcactctgggcgttgatggtaacaatttagctagattcgcagtccaagctgtgtccaggctgccagctggttcagatacctccgcatatgcgcaggcattcagtagcgctctgtttaatgcaggagtattgaatgcttcaaatattgatactctcggtagcagagtcttatccgcattactcaatggagtatcatccgccgcgcaaggtttaggaataaatgtcgattccggttctgttcagtccgacatctcatcttcatcatcgttcctcagtacttcctcctcttcagcgagttactcccaggccagcgcctcttctacgtcaggtacgtcttc

SEQ ID NO: 835 - DNA, 623 bp, synthetic construct
  misc_feature 1..623: note = Description of Artificial Sequence: Synthetic polynucleotide
  source 1..623: mol_type = other DNA
gaagacttagcaggtgcaggatataccggaccttccggaccatcaacgggtcctagtggttatccaggacctctaggaggtggcgccccttttggtcagagtggttttggtggttcagcaggaccccagggaggattcggagctactggtggtgcatcagctggtttgattagcagagtagcaaacgccctagcaaatacatcgactctaagaacagttttgagaacaggtgtctctcaacaaattgcttcctccgtcgttcaacgtgcagctcagtcattggcatctactttaggtgtggatggaaataatttggctagattcgccgtccaagctgtgtctcggctaccagccggctcggacacttcagcttacgcccaggctttctcatccgcactgttcaatgctggagtactaaacgcttcgaacatagatacgctcggatctagagttctaagcgccttgctgaatggtgtcagctccgcagcccaaggacttggaataaacgttgactcaggaagcgttcagtcggacatcagtagtagctcatcattcctgtccacctctagctcgtccgctagctacagtcaagccagtgcctcctccacttcaggtacgtcttc

SEQ ID NO: 836 - DNA, 623 bp, synthetic construct
  misc_feature 1..623: note = Description of Artificial Sequence: Synthetic polynucleotide
  source 1..623: mol_type = other DNA
gaagacttagcaggtgcgggttacaccggaccgtcaggtcctagtactggcccgtccggttacccaggaccattaggcggtggcgcaccttttggtcagtcaggttttggaggctctgatggtcctcaaggaggattcggcgccacaggtggagcctctgctggactaatctcccgtgtggccaacgctctagcgaacacatccactttgaggactgtgctaagaaccggagtatcccagcaaatcgcatctagcgttgtgcagagggccgcacaatcactagcatctactttgggtgtagatggaaataatctggctagattcgccgttcaggccgttagcagactcccagccggttcagatacttctgcttatgctcaagcgttctcatccgccttgttcaacgccggcgttctaaacgcctctaacattgataccttaggttcaagagtcctaagtgccttacttaacggagtttcttccgctgcccaaggacttggtatcaacgtcgattctggttcggttcaaagcgatatttcaagctcctcttccttcttgtcaacttccagctcatctgctagctacagccaagcttcggcaagcagtacatcaggtacgtcttc

SEQ ID NO: 837 - DNA, 590 bp, synthetic construct
  misc_feature 1..590: note = Description of Artificial Sequence: Synthetic polynucleotide
  source 1..590: mol_type = other DNA
gaagacttagcaggtttcaccggagcaagctatcccggtccacaagtctcacagcctgcacctttcggcgtcggcccacaaccaggaggtgctctacctggttttggacaagtatctggagctcaaagtgcccttatttctagaatcgccaacgctttgggtaacaccgctactatgcgagctgtcttgcgcagcggagtgagtcaacaaattgtctcaaatgttgttcaaggagctgtgcaggcattatcatccagtctgggaattgatggtaataacttggcaaggattgcttctcagaccatactcagagtacctgctggttcggacactagcgcatacgctcaagcattttctactgccctgttcaattcgggtgttttgaacgctagtaatgtgaacacattgggctcccaggtggtatcgacgttgctgcgtggcatctcatcaacggcacaaggtcttggattaaacgtcgacgcaggttccgttcaatccgatataagttctagtagttcctttctgtctacttcctcgtcctccacctcatcttcacaaacaactgcagcaagtacgtcaggtacgtcttc

SEQ ID NO: 838 - DNA, 590 bp, synthetic construct
  misc_feature 1..590: note = Description of Artificial Sequence: Synthetic polynucleotide
  source 1..590: mol_type = other DNA
gaagacttagcaggtttcactggagcttcatatccaggaccacaggtgtcacagcctgcacctttcggtgttggtccacaaccaggtggtgcgttaccaggttttggccaagtttctggtgcacaatctgcacttatttcgagaattgcaaatgctctcggaaataccgctaccatgagagcagtgctgagaagcggtgtctcacaacaaatagtctctaacgtagttcagggagctgtacaagctttgtcctcatcacttggaattgatggaaataacctggcacgaatcgcttcgcagactatattacgagtgccagccggaagtgatacttcagcttacgctcaggctttctctactgccttgttcaattcaggagtattgaacgcgtcgaatgttaatacccttggttcgcaagttgtttccacactgctacgaggtatttctaacactgcacagggtctaggactgaatgtagacgctggtagtgtacagagcgacatctcttcatcctcttcgtttctaagcacctcatcttcctctaccagctcaagtcaaacgacggccgcatcgacttcaggtacgtcttc

SEQ ID NO: 839 - DNA, 554 bp, synthetic construct
  misc_feature 1..554: note = Description of Artificial Sequence: Synthetic polynucleotide
  source 1..554: mol_type = other DNA
gaagacttagcaggtgcctcggctgctgatatcgcaactgcaattgctgcaagtgttgccacctccttgcaatccaatggagtactaaccgcctccaacgtgagtcaattgtctaatcagctggcatcttatgtttcttccggtctgtcctctacggcaagttcattaggaattcaattaggtgcctcccttggagccggcttcggagctagcgctggtcttagcgcctctaccgacatcagcagttccgtagaggccacttccgcttctactctatcatcaagtgcaagtagtacttcagtcgtatcaagtattaacgctcaactcgtgcccgcgttggcacagacagccgttcttaacgccgctttttctaacatcaacactcagaacgcgatccgaattgcagaactgttaacacagcaagtcggaaggcagtacggattaagtggaagcgacgtcgcaacggcatcgtcccagattagatctgctctatactctgttcaacagggttcggcttcatctgcatacgtcagcgcgattgtaggtacgtcttc

SEQ ID NO: 840 - DNA, 563 bp, synthetic construct
  misc_feature 1..563: note = Description of Artificial Sequence: Synthetic polynucleotide
  source 1..563: mol_type = other DNA
gaagacttagcaggtcctctaataacagcactcagctcacgcggagtagtgaatgcttctaattcatcacagattgcatcgtccttagctacagctattctgcagtttactgcaaacgtggcaccacaattcggtatcagcattcccaccagcgcagtgcagtccgatctatctactattagtcagtccttgacggctatttcttctcagacctcctcaagcgttgattcttcgacgtctgcattcggtggaatcagtggtccgagtggcccatctccatacggaccacaaccatccggtcctacttttggtccaggcccaagtctttctggccttactggcttcactgctaccttcgctagctctttcaagtcgacacttgcttcgtcaacccagtttcaattgatcgctcaatccaacttggacgtgcagacaagatctagcttgattagtaaagtattgataaacgctttgtcctcactaggtatctccgcctcggtagcctcttcgatagccgcatcttcttcccaatctttgctgagcgtttctgcaggtacgtcttc

SEQ ID NO: 841 - DNA, 554 bp, synthetic construct
  misc_feature 1..554: note = Description of Artificial Sequence: Synthetic polynucleotide
  source 1..554: mol_type = other DNA
gaagacttagcaggtgcttccgcggccgatatagcaaccgcaattgcagcatctgtagctacttcattacagagtaacggtgtcttgacggcatcaaacgtatctcaattgtcgaaccaattagcaagttatgtgagtagtggtttgtcaagcactgcatccagtttgggtatccaactcggcgctagcttgggtgctggtttcggtgctagcgccggattatctgctagtaccgacatctcctcgtcagtggaagcaacttcggcttcgactctgtcaagttccgcatcttccacgtcagttgttagttcaattaacgctcagctagttccagctctcgctcagaccgccgtgctgaatgccgccttttctaacattaatacccagaacgctatcagaatagctgaacttctgactcaacaagtaggcagacagtacggattgagtggttccgacgttgctaccgcatcctctcaaattagaagtgctctctatagtgtacaacagggtagtgcttcttccgcttatgtctcagccattgtaggtacgtcttc

SEQ ID NO: 842 - DNA, 563 bp, synthetic construct
  misc_feature 1..563: note = Description of Artificial Sequence: Synthetic polynucleotide
  source 1..563: mol_type = other DNA
gaagacttagcaggtccgttgataactgctttgtcgtcaagaggtgtcgttaacgcctctaactctagtcagattgcttcctctctggcaacagctattctgcaattcactgctaatgtggctccacagtttggaatctctattccaaccagtgctgttcagtctgatcttagtactattagtcaatccctaactgcaatatcttcccaaacctcgtcatctgtcgattcctctacatccgcattcggtggcatcagtggtccttccggtcctagcccatatggccctcaaccttctggtcccacattcggtcctggcccatcattatctggattgaccggattcaccgctacatttgcctcgtcgttcaagagcactttagcatctagtacacaatttcagttgatcgcccagagtaatttggacgttcaaacaagaagtagcctcatatctaaagttttaattaatgcactgagtagtctgggtatatctgccagcgttgctagctcgatagctgcaagttcctctcagtctctactcagcgttagtgcaggtacgtcttc

SEQ ID NO: 843 - DNA, 536 bp, synthetic construct
  misc_feature 1..536: note = Description of Artificial Sequence: Synthetic polynucleotide
  source 1..536: mol_type = other DNA
gaagacttagcaggtcctggttacggttacgctgcttactatgctgctaattatggctatggtcctggagtaggcgccggttctggtgcgggagccggctcaggctctggagtcggagcaggttcaggatttggagcaggtgcaggatcaggtactggactaggtagaggagctggaactggtgctggagcgggatctggagctggttcgggtgccggtgccggaagcggttctggtgctggtgcgggaagtggcagtggagcaggtgccggaagaggtgctggactcggaggttttggctctggattaggagccggagcaggaacaggagccggagctggttccggaagtggagccggcagcggagctggtgcaggcgctggatccggatttggtgcaggtgctggaagaggagctggttctggtggaacaggttcctggttgagatccggcgtcggtactggttcttctgcttctgccggctctgcaggatcaggtgcaggagtaggatctggtgctggtccaggtacgtcttc

SEQ ID NO: 844 - DNA, 530 bp, synthetic construct
  misc_feature 1..530: note = Description of Artificial Sequence: Synthetic polynucleotide
  source 1..530: mol_type = other DNA
gaagacttagcaggtcctgcatacggatatgctgcctactacgctgccaactatggttacggaccgggtgtaggtgccggttccggtgccggagctggttccggtagcggtgcaggtgctggttcgggttcaggtgctggtgctggctcaggagctggattaggtagaggtgcgggaaccggagcaggtgccggttcaggtgctggatccggcgccggagctggttctggtagtggcgctggtgccggttcaggatcaggagccggagcaggtcgtggtgccggattaggtggtttaggctccggtttgggagctggtgcaggtacgggtgccggatcgggatctggatccggtgccggatccggagccggagctggtgctggaagcggttctggcgcaggagctggtagaggagccggatccggattaggagcaggtttgggctctggtgttggaactggatcaggtgctggagctggcgctggatcaggagctggtgttggttcaggcgctggagcaggtacgtcttc

SEQ ID NO: 845 - DNA, 515 bp, synthetic construct
  misc_feature 1..515: note = Description of Artificial Sequence: Synthetic polynucleotide
  source 1..515: mol_type = other DNA
gaagacttagcaggtccaggctacggatacgctgcatactatgccgcaaattacggatatggtccaggagtcggtgctggtagcggagctggtgctggaagtggatctggtgccggagcaggtagtggaagcggagcaggtgcaggttctggagccggtctgggtagaggagctggtactggcgctggagctggttctggagccggatcgggtgctggagctggatctggcagtggagcaggagccggatccggatctggtgctggagccggtagaggagccggtctaggtggactaggagcaggtttaggagccggagctggatctggtgcaggtgccggatccggcgcaggagctggtgctggcagtggttctggtgccggagctggtagaggtgctggactaggtggtcttggcgctggtctaggttccggtgttggtacaggcgctggtgcaggagctggcgccggttcaggtgcaggagccggatctggagccggtgcaggtacgtcttc

SEQ ID NO: 846 - DNA, 527 bp, synthetic construct
  misc_feature 1..527: note = Description of Artificial Sequence: Synthetic polynucleotide
  source 1..527: mol_type = other DNA
gaagacttagcaggtccaggttacggttatgcagcttattatgctgccaattatggttacggacctggtgttggtgcaggttcaggagccggtgccggatcaggtagtggctcgggtgctggagccggatctggttctggtgctgcagctggaagtggagccggattaggtagaggtgctggtacaggtgctggagcaggttcaggagctggttcaggtgccggatctggtgcgggtgctggatcaggtagtggagcaggagctggtcgaggtgccggtcttggtagactgggttcaggtttaggcgctggcagtggtaccggagctggagctggatcaggttctggtgctggttctggcgctggcgcaggagccggtagtggaagcggcgctggtgcgggtcttggtgctggactaggaggactgggcgccggcttggtttccggagtcggtacaggcgccggagccggagccggagctggcagcggagcaggtgcaggaagtggagccggtgcaggtacgtcttc

SEQ ID NO: 847 - DNA, 527 bp, synthetic construct
  misc_feature 1..527: note = Description of Artificial Sequence: Synthetic polynucleotide
  source 1..527: mol_type = other DNA
gaagacttagcaggtaaggccattagttccggtgctgccagtgccgcagcttctgcttctgctgcatcagcggccgctacagctgtggctgctgcttcattcagtgcttcaaccaccacgaccgccacctcaacgtcagccgctgctactggtgccgctgctgctgccggaggagaggctgctgcagtttcgagcactgcctcgtcatcatttttacaggctttggtgtcctcaatccttgaaagaccagagtttttggttccactaagtcacgctacttccgcttcttccgcttacgccatcacctcaacaattgtcagggacgcagcatacgaaaccgaattcagtaaatgggcaactcagatgagcagtgcggctgcgaaagaggttgctgaggttggaagcggagctagcgcctatgactatgcatatgccatggctcgtggtttgactaaatgtctatcgagatacaacttgattaacagccaagaccctactccttctgctagaaaattaggtacgtcttc

SEQ ID NO: 848 - DNA, 593 bp, synthetic construct
  misc_feature 1..593: note = Description of Artificial Sequence: Synthetic polynucleotide
  source 1..593: mol_type = other DNA
gaagacttagcaggtggacaaggtggacaaggtggctacggaggtttgggttcgcaaggtgctggtcagggcggatatggagctggtcaaggtgcagccgccgcagctgcagctgctggtggcgcaggtggcgctggaagaggaggacttggtgctggtggtgctggtcaaggttacggcgctggtctaggaggacaaggaggtgcaggtcaagctgccgccgcagccgctgccggaggagctggtggcgctaggcagggaggtctgggagctggtggtgccggtcaaggatacggtgctggtttaggcggtcaaggcggtgctggacaaggaggagccgctgccgccgctgctgctgctggtggacaaggcggtcaaggaggttatggtggtctgggttctcaaggtgctggacaaggcggttacggtgccggacaaggtggtgccgcagctgctgctgctgctgccggtggccaaggaggtcaaggtggttatggtggattgggatcacagggtgctggtcagggtggctatggaggaaggcaaggtggagccggcgccgctgctgcggctgctgctgcaggtacgtcttc

SEQ ID NO: 849 - DNA, 677 bp, synthetic construct
  misc_feature 1..677: note = Description of Artificial Sequence: Synthetic polynucleotide
  source 1..677: mol_type = other DNA
gaagacttagcaggtggctatggtcctggagccggtcaacaaggaccaggaggagcgggtcagcaaggccccggatcccaaggtccaggtggagctggacaacaaggacctggaggacaaggtccatatggtccaggagctgccgctgccgctgcagccgtcggtggctatggacctggagctggtcaacaaggtcctggttcccagggtcctggctctggaggtcaacaaggccctggaggtcaaggaccatacggaccgtcggcagcagcagccgcagcagccgctggtggatacggaccaggagcaggccaacaaggtccaggttctcaaggaccaggatcgggcggtcagcagggtccaggtggtttaggcccttacggacctagtgcagctgccgcagctgccgctgctggaggctacggccccggagcgggacaacagggtcctggatctcaaggaccaggttcaggaggtcaacagcgacctggtggattgggtccatacggtccttccgctgctgcagcagcagcagcggccggaggatatggccctggagccggacaacaaggtccaggatctcaaggccctggaagcggaggacaacaaagaccaggaggtttgggaccttatggtccatcagctgccgctgcagctgctgcagcaggtacgtcttc

SEQ ID NO: 850 - DNA, 857 bp, synthetic construct
  misc_feature 1..857: note = Description of Artificial Sequence: Synthetic polynucleotide
  source 1..857: mol_type = other DNA
gaagacttagcaggtagtgcgccacaaggtgcaggtggtccagcgccacaaggtccttcccagcaaggaccagttagccagggtccatatggaccaggtgctgcagccgctgctgctgctgcaggtggttacggaccaggtgccggacaacaaggcccaggtagccagggaccaggtagtggaggacaacagggtccgggatcacagggaccaggatcaggtggccaacagggtcctggtggacaaggcccatatggtccatcggccgccgccgccgccgcagctgcagctggaggatacggaccaggagccggtcaacagggacctggttcccaaggtccaggttccggtggccaacagggacctggcggacaaggtccttacggtcctggcgcagctgctgctgccgcagctgttggtggttacggacctggtgctggacaacaaggccctggatctcaaggtccaggatccggaggtcaacaaggacctggaggacaaggaccttatggtcctagtgcggcagcagcagctgctgcagccggaggttatggaccaggtgctggtcaacaaggtccaggttcacaaggtcccggttctggtggacaacagggtccaggtggacagggtccatacggaccttcagctgccgcagctgccgctgccgcaggaggttacggtcccggagctggtcagcaaggtcctggatctggaggacagcaaggtccaggtggacaaggaccatacggctccggccagcagggaccaggtggtgcaggacaacagggcccaggcggacaaggaccttacggaccaggtgcagctgcagctgctgctgcagcagcaggtacgtcttc

SEQ ID NO: 851 - DNA, 776 bp, synthetic construct
  misc_feature 1..776: note = Description of Artificial Sequence: Synthetic polynucleotide
  source 1..776: mol_type = other DNA
gaagacttagcaggtggttacggtcccggagctggacaacaaggacccggaggtgccggacagcaaggacctggttctcaaggacctggaggtcaaggaccatatggcccaggagccggacaacaaggtcctggtagccagggaccaggttcgggtggtcaacaaggtccgggaggtcaaggcccatacggtccatccgcagctgcagcagcagctgctgccggcggttatggtcctggtgccggccagcaaggaccaggttcacagggcccaggttctggaggtcaacaaggtcctggatctcaaggtcctggtagtggtggccaacaaggaccaggtggacaaggcccatatggcccttccgccgctgctgctgcagcagcggccggaggatatggtccaggagcaggtcagcagggtccaggttctcaaggaccaggctctggcggtcagcagggacctggtggtcaaggaccttatggaccaggagcagctgccgcagccgctgctgtcggaggttacggacctggagcaggtcaacagggtccaggatcgcagggaccaggatccggtggacagcaaggtccaggcggacaaggaccttacggaccatcagctgccgctgccgcggccgctgctggaggttatggaccaggcgcaggtcaacaaggacctggtagccaaggccctggtagtggtggacaacagggtccaggtggtcaaggtccatatggtccatccgcagcggctgctgctgctgccgcaggtacgtcttc

SEQ ID NO: 852 - DNA, 707 bp, synthetic construct
  misc_feature 1..707: note = Description of Artificial Sequence: Synthetic polynucleotide
  source 1..707: mol_type = other DNA
gaagacttagcaggtggatatggacctggcgctggtcagcaaggtcctggatctggaggacagcagggacctggtggacaaggtccatatggcagcggtcaacaaggaccaggtggagcaggtcaacaaggacctggaggtcagggaccttatggccctggtgcagccgcagccgcggccgccgctgctggtggttacggaccaggcgcaggtcaacaaggtcctggcggtgctggacaacagggcccaggttcccagggcccgggtggtcaaggtccatatggtcctggagcaggacaacagggtcctggttctcagggtccaggtagtggcggtcaacaaggtccaggaggccaaggtccttacggcccatcagccgcagcggctgccgctgctgctgccggtggttacggacccggtgctggtcaacgaagtcaaggtccaggaggtcagggtccatacggtccaggtgcaggtcagcagggaccaggatctcaaggtccaggttcaggaggccaacaaggcccaggaggtcagggaccatatggtccatctgctgctgctgctgccgctgccgcaggacctggtgctggtagacaaggtcctggtagccaaggtcctggatccggaggtcagcaaggcccgggcggtcagggtccatatggaccatcggctgctgccgcagctgctgctgcaggtacgtcttc

SEQ ID NO: 853 - DNA, 794 bp, synthetic construct
  misc_feature 1..794: note = Description of Artificial Sequence: Synthetic polynucleotide
  source 1..794: mol_type = other DNA
gaagacttagcaggtcctggagcaagaaggcaaggtccaggtagtcagggcccaggttcgggtggtcaacaaggaccaggtggtcagggtccatatggtagtggccagcaaggtccaggtggcgccggtcaacaaggtccaggcggacaaggaccttacggtccaggcgctgccgccgcagcggctgcagccgcaggtggctatggtcctggtgctggccaacaaggaccaggaggagctggccaacagggaccaggaagtcaaggacctggaggacagggaccatatggtccaggagcaggacaacaaggtccgggctcccagggtccgggatctggaggacaacagggccctggaggacaaggtccatatggaccttcggccgccgcagctgcagctgccgcaggaggatatggccctggtgctggacaacagggacctggatcccaaggacctggtagtggaggtcaacaaggcccaggaggacaaggtccttacggtcccggtgcagctgccgctgctgccgctgtaggcggttacggaccaggagcaggtcaacaaggtcctggttctcaaggacctggttcaggaggacaacagggtccaggcggtcaaggcccttatggaccatccgctgctgctgctgcagctgcggcaggtggctacggtcctggtgccggacaacaaggtccaggatctcagggacctggttccggaggacaacaaggaccgggaggacaaggtccgtatggtccttctgctgccgcagccgcggctgctgcaggtacgtcttc

SEQ ID NO: 854 - DNA, 788 bp, synthetic construct
  misc_feature 1..788: note = Description of Artificial Sequence: Synthetic polynucleotide
  source 1..788: mol_type = other DNA
gaagacttagcaggtggatacggaccaggtgcaggacaacaaggccctggttccggtggacaacaaggaccaggtggacagggcccttacggctcaggtcagcaaggtccaggaggagcaggtcaacagggtcctggtggtcaaggaccttatggaccaggagctgctgccgcggcagcagcagctgccggaggttacggtccaggtgccggacaacagggtcctggaggtgctggacagcagggtccagagggaccaggttcccaaggtcctggatctggtggtcaacaaggaccaggaggtcagggcccttacggtccaggagctgcagccgctgctgctgcggtcggaggttacggacctggagctggacaacaaggacctggttcacagggacctggaagtggtggtcaacaaggtcctggaggccaaggcccatacggtccatcagctgccgctgccgcagctgctgccggtggttatggtcctggtgctggtcaacaaggtccaggatcgcaaggcccgggatcgggtggacaacagggtccgggaggtcagggaccatatggcccaagtgccgctgcagcagccgccgcagctggtggatatggaccaggagcaggtcaacaaggacctggatccggtggacaacagggaccaggtggacaaggaccatatggatctggtcaacagggaccaggaggtgctggccagcaaggccctggtggtcaaggaccatatggtccaggagcggccgctgctgcggccgctgctgcaggtacgtcttc

SEQ ID NO: 855 - DNA, 779 bp, synthetic construct
  misc_feature 1..779: note = Description of Artificial Sequence: Synthetic polynucleotide
  source 1..779: mol_type = other DNA
gaagacttagcaggtggatacggtccgggtgcgggtcaacagggaccaggtggagctggtcaacagggacctggatcacaaggacctggaggtcaaggcccttatggtcccggtgcaggacaacaaggacctggatcgcaaggtcctggatctggaggacagcaaggtcctggtggccaaggcccatacggtccatcagccgcagctgccgcagctgctgccggaggttatggaccaggtgctggtcaacaaggcccgggttcacaaggacctggtagtggtggtcagcaaggaccaggtagtcagggaccaggatcaggtggacaacaaggtccgggtggtcaaggtccatatggaccgtccgctgcggctgcagcagctgctgccgcaggaggttacggacctggcgctggtcaacagggtccaggttcccaaggacctggttctggaggtcaacaaggtccaggtggacagggcccatacggaccaggagcagccgccgccgcagctgctgtgggtggttatggtccaggtgccggacagcaaggaccaggatcccaaggaccaggttctggcggccaacagggtccaggaggccagggcccttatggaccaagtgctgccgcagccgccgcagcagcgggtggttacggtccaggtgccggtcaacaaggaccaggatctcaaggtccaggttccggcggtcaacaaggcccaggaggtcagggtccttatggaccatcggcagctgctgctgctgcagcggcaggtacgtcttc

SEQ ID NO: 856 - DNA, 806 bp, synthetic construct
  misc_feature 1..806: note = Description of Artificial Sequence: Synthetic polynucleotide
  source 1..806: mol_type = other DNA
gaagacttagcaggtggttacggtccgggcgctggacaacaaggaccaggttctggtggacaacaaggtcccggtggacaaggtccttacggttcaggccagcaaggtccgggaggagctggtcaacaaggaccaggcggtcaaggtccatacggaccgggagcagcagctgcagcagcagccgctgctggtggatatggtcccggagctggtcaacagggacctggaggagccggacaacaaggacctggtagtcaaggtcctggtggacaaggtccatacggcccaggagcaggtcagcaaggtccgggttctcaaggtcctggctcaggtggacaacaaggcccaggtggacaaggaccatatggtccttctgctgctgccgctgctgcagcagcaggaggatatggaccaggtgctggtcaacagggtccaggttctcagggcccgggttccggaggacagcaaggaccaggcggacaaggcccttacggaccgtcggccgccgctgcggctgctgcagcaggaggatacggtcctggcgcgggtcaacaaggtcctggatctggcggtcagcaaggtccaggaggtcaaggaccatacggttctggtcaacaaggcccaggaggagctggacagcagggccctggaggtcaaggtccttacggtggcggttatggtccaggtgctggacaacagggtcctggatcgcagggaccaggaagtggcggtcaacaaggtccaggtggtcaaggtccttatggtcctagcgccgctgcagctgcagctgcagcaggtacgtcttc

SEQ ID NO: 857 - DNA, 797 bp, synthetic construct
  misc_feature 1..797: note = Description of Artificial Sequence: Synthetic polynucleotide
  source 1..797: mol_type = other DNA
gaagacttagcaggtccaggagcccgtagacaaggtccgggctcacaaggtccaggatctggtggacaacaaggaccaggtggccaaggcccatacggatctggacaacagggtcctggtggagctggtcaacagggtccgggcggtcagggcccctacggtccaggagcagcagctgctgcggctgctgcagcaggaggatatggacctggagccggtcaacagggacctggaggtgctggccagcagggtcctggttctcagggaccaggtggtcagggtccatacggcccaggcgccggtcagcaaggaccaggttcacaaggcccaggctctggaggtcagcaaggacccggaggtcaaggtccttatggtccaagtgccgctgctgctgctgctgcagctgcaggaggatacggtccgggagctggtcagcaaggacctggttcgcaaggtcctggtagtggtggccaacaaggtccaggtggtcaaggaccgtacggtccaggagctgcagctgccgccgctgctgtaggaggatacggtccaggtgctggtcaacaaggtcctggaagtcaaggtccaggatccggaggtcagcagggacctggtggacaaggaccttatggtccttctgcagcagctgcagcggctgccgctggtggatatggtcctggagctggacagcagggcccaggatctcagggcccgggttctggaggacaacaaggacctggtggacagggtccatacggaccttccgctgccgccgcggcagctgcagcaggtacgtcttc

SEQ ID NO: 858 - DNA, 755 bp, synthetic construct
  misc_feature 1..755: note = Description of Artificial Sequence: Synthetic polynucleotide
  source 1..755: mol_type = other DNA
gaagacttagcaggtggtcagggaggaagaggaggattcggaggtctaggatcacagggcgagggaggagccggacagggaggtgcaggcgcagctgcagctgctgccgctgcaggagctgatggtggtttcggtctaggaggctacggagctggacgaggttatggagcaggactaggaggtgcaggtggagctggtgctgcttcagctgccgctgccgctggtggtcaaggtggaaggtctggtttcggtggcctgggttctcaaggagccggcggtgcgggtcaaggaggtgccggcgctgccgccgcagctgctgcagctggtgccgacggtggctctggtctgggaggatatggagctggacgtggttatggagctagcttgggtggagctgatggtgctggagctgcctccgcggcagccgccgctggaggacaaggtggcaggggtggttttggtggtttgggctctcaaggagcaggtggtgcgggacaaggtggtgccggtgctgctgccgccgctgctgctgcatctggagacggaggttctggattaggaggttatggtgccggaagaggatacggcgctggtcttggaggcgctggcggtgctggtgccgcttctgccgcagctgctgccggtggtgaaggaggacgtggaggttttggaggactcggatctcagggcgctggtggtgcaggacaaggtggctccctcgcggcggccgcagccgcagccgcaggtacgtcttc

SEQ ID NO: 859 - DNA, 746 bp, synthetic construct
  misc_feature 1..746: note = Description of Artificial Sequence: Synthetic polynucleotide
  source 1..746: mol_type = other DNA
gaagacttagcaggtgctgatggcggttcaggacttggaggttacggtgccggtagaggttacggagcaggactaggtggagctgatggagccggtgccgcttctgctgcagccgccgcaggaggacaaggtggtagaggtggttttggtagactcggttcgcaaggagctggaggagcaggtcaaggtggagctggcgcagccgctgcggttgccgcggcgggaggtgacggaggttcaggtcttggcggttacggcgctggtagaggatacggcgctggtttaggtggtgctggcggagctggagccgcatccgctgcggccgccgctggaggccaaggcggccgaggaggtttcggtggactgggatcacaaggagctggtggagctggccagggaggtgctggcgcagccgcctcgggagatggaggtagcggactaggtggatacggagctggccgtggttacggagctggattgggaggcgctgatggtgctggtgccgcttcagctgcttcagcagccggtggccaaggaggtaggggtggttttggaggactcggaagtcaaggagcaggaggagccggtcaaggcggtgctggtgcggccgccgctgcagctactgccggtggtgatggaggctccggactaggaggttatggtgccggaagaggttacggtgcgggcctgggcggtgctggaggtgcaggtgctgcttcggccgcagccgccgcaggtacgtcttc

SEQ ID NO: 860 - DNA, 863 bp, synthetic construct
  misc_feature 1..863: note = Description of Artificial Sequence: Synthetic polynucleotide
  source 1..863: mol_type = other DNA
gaagacttagcaggtggacagggcggaagaggaggttttggaggattgggatcccaaggtgctggaggagccggacagggtggcgctggagcagctgctgccgcagctgctgctggaggtgacggaggttccggtttaggcggttacggcgccggtcgaggacacggagtaggtcttggaggtgccggtggtgcgggtgccgcttccgctgctgcagctgccggtggtcaaggaggacgcggaggtttcggaggacttggatctcaaggtgctggtggtgccggtcaaggtggtgctggtgccgctgcagcggctgctgcagctggtggtgatggcggttcaggtttgggaggatacggtgcaggtagaggtcacggtgctggtttgggcggtgccggaggcgcaggtgctgcctctgcagcggcagcagctggaggtcaaggtggaagaggaggatttggtggcctgggttcgcaaggctccggtggagcaggtcagggaggatctggagctgctgctgcagccgctgctgcaggcggagacggtggttctggcttgggtggttatggagccggtcgtggttatggcgcaggtctgggtggtgctggcggagctggcgcagcttccgctgcggctgccgccggaggccagggtggaaggggaggattcggaggattaggatcgcaaggtgccggtggcgccggacaaggaggatcaggagctgctgctgccgctgccgcagccgtcgctgacggtggatctggtttgggaggatatggtgcaggcaggggatacggagctggattaggaggtgcaggaggtgctggtgcagcttcagcagccgctgccacaggtacgtcttc

SEQ ID NO: 861 - DNA, 716 bp, synthetic construct
  misc_feature 1..716: note = Description of Artificial Sequence: Synthetic polynucleotide
  source 1..716: mol_type = other DNA
gaagacttagcaggtggtcaaggcggacaaggaggatatgacggactaggtagccaaggtgcaggtcaaggaggttacggtcagggaggagccgctgcggcggctgcagctgcctctggtgcaggatccgctcaaagaggaggtttgggtgcaggtggtgccggacaaggttacggtgccggatccggcggtcaaggaggcgcaggtcaaggaggcgccgctgcagccactgctgctgccgctggtggacaaggcggtcaaggtggttacggtggattgggatctcaaggatcaggccaaggcggctacggccaaggaggtgctgctgctgctgcggctgccgcatcaggtgacggaggagctggtcaagaaggacttggtgctggtggagctggacaaggttatggcgccggtcttggtggacagggtggcgcaggacagggtggtgctgccgccgctgctgctgcagccgctggaggtcaaggcggtcagggcggatatggtggcttaggctctcaaggtgctggacaaggtggttatggacaaggtggtgcagctgcagctgctgctgcggcctctggagctggtggtgctggccaaggaggtctaggcgcagctggcgctggtcaaggttacggagcaggatctggcggacaaggtggtgccggtcaaggtggagctgctgcagcagctgccgcagcagcaggtacgtcttc

SEQ ID NO: 862 - DNA, 716 bp, synthetic construct
  misc_feature 1..716: note = Description of Artificial Sequence: Synthetic polynucleotide
  source 1..716: mol_type = other DNA
gaagacttagcaggtggacaaggaggtcaaggaggttacggtggattgggttctcagggagctggtcaaggtggatacggacagggaggtgttgctgcagctgcggctgctgccagcggtgcaggaggagccggacgtggtggtctgggcgctggtggtgccggtcaagaatacggagcagtttctggtggacaaggaggtgcgggtcagggaggtgaggctgcagctgctgcagcagctgccggtggccagggaggacaaggtggctatggtggactcggtagtcaaggagcgggtcaaggcggatatggtcaaggtggtgctgccgcagctgccgctgcagcctccggtgccggaggtgctagacgtggtggattaggagctggaggtgcaggacaaggatatggtgccggattgggtggacaaggtggagccggtcaaggaagcgcttcagccgccgcagctgctgcagctggaggacagggaggtcaaggtggatatggcggacttggtagtcaaggcagtggtcaaggtggttatggacagggcggtgccgctgctgctgcagccgctgcatcgggtgctggaggtgccggccgaggatctttgggagccggaggcgccggacaaggttacggtgctggacttggtggtcaaggtggagcaggtcagggtggtgccgctgctgccgcttctgctgcagcaggtacgtcttc

SEQ ID NO: 863 - DNA, 428 bp, synthetic construct
  misc_feature 1..428: note = Description of Artificial Sequence: Synthetic polynucleotide
  source 1..428: mol_type = other DNA
gaagacttagcaggtggttatggtcctggagccggacagcagggacagcaagcgggtcaaggttccggacagcagggcccaggtggtgcaggacaaggtggtccacgaggtcagggaccttatggacctggagcagctaccgctgcagcagcagctgcaggacctggttacggtcctggagctggacaacaaggtccgggttcgcaaggtcctggttcaggaggacagcaaggacctggttcacaaggtccttatggcccatctgctgctgccgctgctgccgcagcaggaccaggttacggacctggtgctggtcaacaaggtcctggtagtcagggccctagaagtggaggacaacaaggccctggtggacaaggaccttacggtccttccgccgctgctgctgccgccgcagcaggtacgtcttc

SEQ ID NO: 864 - DNA, 443 bp, synthetic construct
  misc_feature 1..443: note = Description of Artificial Sequence: Synthetic polynucleotide
  source 1..443: mol_type = other DNA
gaagacttagcaggtccaggttatggaccaggagctggtcagcagggccctggttccggtggacaacaaggtggaccaggctctggccaacagggcccaggtggtgccggtcaaggaggacctagaggtcaaggtccatatggtccaggtgcagctgccgccgccgcagctgcagctggtggatatggaccaggtgctggccagcagggaccaggttctcagggacctggtagcggtggccaacagggaccaggaagtcagggcccatatggacctagtgctgctgcagctgctgctgccgcgggtccgggatatggcccaggagcaggacagcaaggccctggctctcaaggccctggttcaggtggacagcaaggtccaggaggacaaggaccttatggtccatctgcagctgctgccgctgcagcagcaggtacgtcttc

SEQ ID NO: 865 - DNA, 443 bp, synthetic construct
  misc_feature 1..443: note = Description of Artificial Sequence: Synthetic polynucleotide
  source 1..443: mol_type = other DNA
gaagacttagcaggtccaggatatggaccaggtgcaggacagcagggaccgggatcaggaggacaacaaggcggtcaaggttcaggtcaacaaggtccaggaggtgctggccagggaggtcctagaggtcaaggaccatatggacctggtgccgctgcggctgccgcagctgcagcaggtggttacggtccaggtgccggacagcaaggcccaggatcacagggtccaggttctggtggtcagcagggtccgggttcgcaaggaccctatggtccatcagccgcagctgctgctgccgcagctggtccaggttacggacctggtgctggccaacaaggaccaggcagtcagggtccaggtagtggtggtcaacaaggcccaggtggtcaaggaccttacggtccatctgctgctgccgctgctgcggcagcaggtacgtcttc

SEQ ID NO: 866 - DNA, 440 bp, synthetic construct
  misc_feature 1..440: note = Description of Artificial Sequence: Synthetic polynucleotide
  source 1..440: mol_type = other DNA
gaagacttagcaggtccaggatacggcccgggagccggacaacagggtcctggttcaggaggtcaacaaggcggccaaggttctggccaacaaggacctggtggtgctggacagggaggtccaaggggtcaaggaccatatggtccaggtgctgctgctgctgccgccgctgctggtggttatggccctggagctggacaacaaggaccgggttctcaaggaccaggctctggaggtcagcaaggcccaggttcccaaggcccgtacggtccatctgcagcagcagctgccgctgctgctggtcctggttatggtccaggagctggacagcaaggtcctggatctcagggtccaggatctggtggacagcagggaccaggaggtcaaggtccatatggaccatctgacgctgctgccgcagctgcagcaggtacgtcttc

SEQ ID NO: 867 - DNA, 440 bp, synthetic construct
  misc_feature 1..440: note = Description of Artificial Sequence: Synthetic polynucleotide
  source 1..440: mol_type = other DNA
gaagacttagcaggtcctggttatggacccggtgccggacaacaaggaccgggttcaggtggccagcaaggaggtcaaggttcaggacaacaaggtcctggtggtgctggacagggaggacctagaggtcaaggaccctacggtccaggagcagcagctgcggccgctgctgctggaggatacggtccaggtgcaggacagcaaggacctggctcacagggaccaggcagtggaggacaacagggacctggctctcaaggtccgtatggtccaagtgctgccgcggcagcggctgctgccggtccaggttacggccctggtgcaggtcaacagggcccaggttcacaaggtcctggttctggtggacagcagggtccaggttctcaaggaccttatggtccatctgccgcagctgccgcagctgctgcaggtacgtcttc

SEQ ID NO: 868 - DNA, 575 bp, synthetic construct
  misc_feature 1..575: note = Description of Artificial Sequence: Synthetic polynucleotide
  source 1..575: mol_type = other DNA
gaagacttagcaggtgcagcagccgcgtccgaggcagcagcctccgctgccgcaacatccacaaccacaacaacaagcacttccagagcggcggccgccgcctcggctgcagccgcagcttctgcatctggtgctgctggtgctgcaggagcagcctctgctgcatccgctgcttctgcaagctcctcgttgcagcaatcacttggttcagccctggcacaaagtagttcttttgctgccgcgtttgctcaagcatccagtgctgccagcgcagctgctattgcttatgccttagctcaaacggttgccaaccaaataggtttctccagttattcgtccgcatttgccagagccgcatcttccgccgtatattctattggaggtttggcttctgcgagcgcttatgcattcgcatttgcttctgcctttagtcaagtattgtctaactatggactcctcaatatcaacaatgcttatagcttggcttcatccattgcctcagctgcctcctcgtctgcttcaagcgccgctgccgctgctgccagctcgtctagtgccgctgcaggtacgtcttc

SEQ ID NO: 869 - DNA, 572 bp, synthetic construct
  misc_feature 1..572: note = Description of Artificial Sequence: Synthetic polynucleotide
  source 1..572: mol_type = other DNA
gaagacttagcaggtgctgccgcagcttcgggaactgcagcttccgcagcagctacttcaacaactaccacaacatcaacttctagagccgcagcagcggcaagtgcggcagcagctgcttccgctagtggtgctgctgatgccgctggtgctgcatccgctgcaagcgctgcttcagcatcctcatctctccagcagtcccttggttctgctcttgcccaaagttcgtcatttgctgcagcattcgcacaagcgaattctgcagccagtgctgcagccatagcctacgctttggcacagacagttgccaatcaaattggcttttcatcatacagttctgcgttcgcgtctgccgcatctagcgctgtatctagtttgggcggattcgcttcagcttcagcttacgcttttgcatttgctagtgcattttcacaagttttgtcaaattatggcttactgaacattaataatgcctactcattggccagttccattgcatctgctgctagttcttcagcctcaagcgccgctgccgctgcttcttcatcttccgctgccgcaggtacgtcttc

SEQ ID NO: 870 - DNA, 554 bp, synthetic construct
  misc_feature 1..554: note = Description of Artificial Sequence: Synthetic polynucleotide
  source 1..554: mol_type = other DNA
gaagacttagcaggtagtggtgctgcgagggccgctcagacagcctccgccgcttccgctgcatctgcttcgagttcacttcagcagtcacttggttccgcactcgctcaaagctcaagttttgcggctgcgtttgaccaggctaactcagccgcttcggctgctgcaatcgcttacgccctggctcaatctgctgcaaaccaagtaggactgagctcatattctgcagctatttctaatgctgcggcagctgctgtgggttccgtcggaggctacgcttctgcttcggcttatgcttttgcgtttgcatctggagtttcacaagtgttgagtaactacggattaattaatctatctaacgcattgtttttggccagtagtattgcaaatgcagcaagtgcaagtgcatcctctgccgcagccgcagctagttcttcgagcgcagctacgggcgccgctgctgcactgggtggtgccggtagtgctgcagcaacctccacgactactatcacttcgacctctacggcggtggcagcagcttcaggtacgtcttc

SEQ ID NO: 871 - DNA, 731 bp, synthetic construct
  misc_feature 1..731: note = Description of Artificial Sequence: Synthetic polynucleotide
  source 1..731: mol_type = other DNA
gaagacttagcaggtcctggaggttacggtggaccaggacagcagggtcctggtcaaggacaacaacaaggacctgcttcagctgccgcggccgctgctgccgctggacctggaggatatggtggacctggtcagcaaggacctggacaaggtcaacagcagggtcctgcaagcgctgccgcagcggctgccgccgctgcgggtcctggtggatacggaggacctggacagcagcgtcccggacaggctcaatacggtagaggtaccggtcaacaaggtcaaggtccaggtgctcaacaaggtccagctagtgcagctgccgcagctgcagctggagctggattatacggcggaccaggtcaacaaggccctggtcaaggtcagcaacaaggacccgcatcagcagcagctgccgctgccgctgctgccgcagctggaccaggcggatatggtggtccgggtcaacagggtccaggacaagcccaacagcaaggaccagcctctgctgctgctgccgctgctgctggcccaggaggctactccggaccaggacagcaaggtcctggacaggctcaacaacagggtccagcttcagccgctgccgccgccgccgctgccgctggtccaggtggttacggtggtcctggccaacagggtccaggtcaaggccaacaacagggacctgcttccgctgctgctgctgcagccgctaccgcagcaggtacgtcttc

SEQ ID NO: 872 - DNA, 707 bp, synthetic construct
  misc_feature 1..707: note = Description of Artificial Sequence: Synthetic polynucleotide
  source 1..707: mol_type = other DNA
gaagacttagcaggtccaggaggatacggtggtccaggtcaacagggacccggacagggtcaatatggtccaggtactggtcagcaaggacaaggaccgtctggacaacagggaccagcaggcgctgccgcagcagcagccgctgcggcaggtcctggaggttatggtggtccaggtcagcagggtccaggtcaaggacaatacggacctggtgctggacaacaaggccaaggtcctggtggccaacagggtccggcgggtgctgctgctgcagccgctgctgctgcaggacccggtggttatggaggtccaggtcaacaaggacctggccaaggacaacaacaaggtagggcaggagcagcggctgcggccgctgctggaccaggaggctacggaggtccaggacagcaaggtcctggtcaagcacagcaacaaggaccggcagcagccgctagtgctggacctggtggttacggtggtcctggtcaacaaggacccggtcaaggtcaacagaagggacctgcatcagctgcagctgcagctgctgccacagcagccggtccaggaggatatggcggtcctggtcaacagggtcctggtcaaggccagtacggccctggtaccggtcaacagggtcaaggtccaggtggtcaacaaggtcctgcatcagctgccgccgctgcagctgctgctgcaggtacgtcttc

SEQ ID NO: 873 - DNA, 755 bp, synthetic construct
  misc_feature 1..755: note = Description of Artificial Sequence: Synthetic polynucleotide
  source 1..755: mol_type = other DNA
gaagacttagcaggtcctggtggatacggtggaccaggccagcctggaccgggacaaggtcaatatggccctggtccaggccagcagggaccaagacagggtggtcaacagggtccagctagtgccgctgccgctgccgcagccggtccaggcggctacggtggtcctggacaacagggaccacggcagggtcaacagcaaggtcctgcatccgcagctgctgccgctgctgccgcagctgcgggtcccagaggttacggtggaccgggtcagcaaggaccagtacaaggaggacaacaaggacctgcctctgccgcagctgccgcagctgctgctggtgttggaggatatggtggtccgggtcaacaaggaccaggacaaggccaatacggtcctggaactggtcaacaaggacagggaccatccggacagcagggtcctgctggtgccgccgctgcagcagctggtggtgctgctggtccaggtggttatggaggtccaggacaacaaggtccaggtcaaggacaatatggtccaggaacaggtcaacagggccaaggcccaagtggtcaacaaggtccggcaggagcagccgcggctgccgctgctgctgccggtccgggaggttatggtggcccgggacaacagggtccaggacagggacagtatggtcctggtgcaggtcagcagggtcaaggtcctggttctcagcaaggtccagcatcagcggctgcagcagcagcaggtacgtcttc

SEQ ID NO: 874 - DNA, 923 bp, synthetic construct
  misc_feature 1..923: note = Description of Artificial Sequence: Synthetic polynucleotide
  source 1..923: mol_type = other DNA
gaagacttagcaggtcctggtggttacggaggtcctggtcaacaaggtccaggtcaaggtcagtacggacctggaacaggtcaacaaggtcagggacctggtggacagcaaggaccagttggtgccgctgctgcggccgctgctgcagtttctagcggcggatatggttcgcaaggcgccggacaaggtggacaacaaggatccggtcagggcggaccagccgctgccggacctggaggttacggaggacctggtcagcagggtcctgagcagggtcaatacggttccggtgcaggtcaacaaggacaaggtcctggtggacagcagggacctgcttctgccgccgccgccgccgcagctggcccgggtagatacggtggaccaggtcagcagggacctggacaaggtcagtatggtccaggtacgggacagcagggtcagggtccagcatccgctgctgctgctgccgcagcaggaccaggaggttatggaggtccgggtcagcaaggtcctggtcagggcagaggaacaggacagcagggtcaaggattaggaggccaacaaggtcccgattctgctgccgctgctgccgccgctgccggtccaggaggttatggtggaccaggtcaacagggtccaggacaaggacaatatggacctggtacgggacaacaaggacaaggacctggcggtcaacaaggacccgtcggagctgccgcagctgctgcagctgcagtctcctctggaggatatggatcgcaaggcgctggacaaggaggacaacagggaagcggtcagagaggaccagcagctgctggtccgggaggttactcaggccctggacaacaaggccctggtcaaggtggacagcaaggtcctgcaagtgctgcagctgcagctgccgctgcagcaggtacgtcttc

SEQ ID NO: 875 - DNA, 749 bp, synthetic construct
  misc_feature 1..749: note = Description of Artificial Sequence: Synthetic polynucleotide
  source 1..749: mol_type = other DNA
gaagacttagcaggtccaggaggttatgtaggtagtggtcagcaaggtcctggacagggaagaggtaccggacaacagggtcaaggaactggtggtcaacaaggtcctgctagtgccgctgcttccgcagctgctggaccgggcggatatggaggccctggtcaacaaggacctggacaaggaggccagcagggtccagccacagcggccgctgccgctgctgcggcagctggtcctggaggatatggaggtcctggtcaacagggtccaggtcaaggacaatatggaccaggtacaggtcaacaaggacagggtccaggcggtcaacagggaccagcaggcgccgctgctactgccgcagctgccgcaggacctggcggctatggaggacctggccagcagggcccagaacaaggtcaatatagaccaggagctggccagcagggacagggcccaggaggacaacagggcccagctagtgccgccgctgcagctgctgctggtccgggaggctatggtggtccaggtcaacaaggtccaggacgtggtcaatacggtccaggtactggacaacaaggtcagggtccggcctcggctgctgcagctgctgcagccggtcctggtggctatggaggtcctggacagcagggaccaggtcaaggaagaggaacaggtcaacagggacagggtttgggaggtcaacaaggaccagattctgcagctgcagctgccgcagcaggtacgtcttc

SEQ ID NO: 876 - DNA, 710 bp, synthetic construct
  misc_feature 1..710: note = Description of Artificial Sequence: Synthetic polynucleotide
  source 1..710: mol_type = other DNA
gaagacttagcaggtccaggaggatacggaggaccaggtcaacaaggtccgggtcaaggccagtatggaccaggaactggacaacaaggacaaggaccaggtggacagcagggaccagttggagctgctgcggctgcagctgcggctgtgtctagtggtggttatggttcccagggtgctggtcagggtggccaacaaggctctggacagagaggtccagctgccgctggaccaggcggttattccggtccgggtcaacagggccccggacaaggtggccaacaaggaccagcatccgccgctgctgcagctgctgccgctgcaggtcctggtggatatggtggttccggccagcagggtcctggacaaggacgaggaactggtcaacagggtcaaggtccaggcggtcaacaaggtcctgcttcggcggccgccgcagctgccgccggacctggaggatatggaggtcccggtcaacaaggcccaggtcaaggtcaatatggacctggtactggacagcagggccaaggtcccgcttctgctgctgctgcagccgccgctggacctggtggatatggcggaccaggtcagcaaggtcctggtcagggtcaatacggtccaggtactggacagcaaggccaaggtccaggtggtcagcaaggaccgggaggagcaagtgctgctgcagctgcagcagcaggtacgtcttc

SEQ ID NO: 877 - DNA, 491 bp, synthetic construct
  misc_feature 1..491: note = Description of Artificial Sequence: Synthetic polynucleotide
  source 1..491: mol_type = other DNA
gaagacttagcaggtacaggaggagttggtggattgttcctatccagcggtgactttggacgaggtggtgctggagctggcgctggtgcggccgccgctagcgcagctgccgcatctagcgcagctgctggtgctagaggaggttccggattcggtgttggtacaggcggttttggacgtggcggagccggagcgggtactggtgctgctgctgccagtgcagccgccgcctctgctgcggctgcaggagctggtggagatggtggcctattcctgagtagtggagattttggacgtggaggagcgggcgctggcgctggagctgccgcagcctctgctgctgccgcatcatctgccgccgcaggagcacgtggtggatcaggattcggagttggaacgggcggatttggcagaggtggagcaggagatggagcttcagcagcggcggcatcggcagcagcagcttcagctgctgctgcaggtacgtcttc

SEQ ID NO: 878 - DNA, 725 bp, synthetic construct
  misc_feature 1..725: note = Description of Artificial Sequence: Synthetic polynucleotide
  source 1..725: mol_type = other DNA
gaagacttagcaggtgctggaggtgatggcggtttattcctgagctctggtgacttcggtcgaggtggcgcaggagccggagctggtgccgctgctgctagcgcagcagccgcttcttccgctgctgctggagccaggggaggatctggcttcggagtcggtaccggaggctttggtcgtggaggagccggtgatggagcttccgccgctgcagcttccgcagccgccgcctccgccgcagcagctggagcaggaggtgattccggactatttttatctagtggcgattttggtagaggaggagcaggtgctggtgcaggtgctgcagccgcgtcggccgctgcagcatcggcggccgccgccggtactggcggagtcggtggattattcctttcaagtggagattttggaagaggtggtgcaggagctggtgctggtgctgctgcagcttcagccgctgcagcatcttcggctgccgccggagcgcgtggaggttctggattcggcgttggtaccggaggattcggtcgtggaggaccaggtgctggtactggagccgcggctgccagtgctgccgctgcttcagcagctgcggcaggcgccggaggagattctggacttttcttatcttccgaggatttcggaagaggaggagctggtgccggtacaggtgccgcagcggcatccgcagcagctgcctctgctgccgctgcaggtacgtcttc

SEQ ID NO: 879 - DNA, 752 bp, synthetic construct
  misc_feature 1..752: note = Description of Artificial Sequence: Synthetic polynucleotide
  source 1..752: mol_type = other DNA
gaagacttagcaggttcaggtgctggtcaaggtaccggtgctggtgctggtgctgctgctgcagcagccggtgccgcaggtagtggagctggtcaaggtgctggatctggagcaggcgcggctgcagcggcggccgcggcttccgctgcaggtgcgggccaaggtgctggatcaggtagcggagctggtgcggctgcggctgctgcggccgccgctggtgctggccaaggagctggaagcggatccggagccggcgcggctgccgctgctgccgcagcagccgcagcagctcaacaacaacaacaacagcaagcagcagctgctgcagcagctgccgctgcagccgcagctggttctggtcaaggtgcctctttcggagtaacgcaacaattcggtgcaccatctggtgctgcctcctctgctgctgccgctgctgctgcagcggctgccgccgctgctggcagtggtgcaggccaagaagctggcacaggtgctggtgcagccgcggctgctgcagccgcaggagcagccggatcgggtgcaggtcaaggcgctggaagtggagccggtgctgctgctgctgcggctgcagctgcctcagctgctggcgcgggacaaggtgctggttctggttcaggagctggtgctgccgcagctgctgctgctgccgccgctgcggcacaacagcagcagcagcagcaagcggcagcagctgcagctgctgccgctgcagctgccgcaggtacgtcttc

SEQ ID NO: 880 - DNA, 590 bp, synthetic construct
  misc_feature 1..590: note = Description of Artificial Sequence: Synthetic polynucleotide
  source 1..590: mol_type = other DNA
gaagacttagcaggtggtgctggacaatctggctcaggtccatacggtgcttcttacttgtcctctacaacctatactacttcctctcaaggagcaggaggtggcgtcggtggttacggtcaaggttcaggaactggttccgctgcagctgctgctggtgctgctggcgctggccaaggaggccaaggaggttatggacaaggtgctggacagggtggtttgggtggatacggacagggtggtggagctggtgcagcagccgcagccgcggctgcagcaggaggtgcaggttccggtcaaggaggatatggaggccaaggaggcttaggtggttacggacagggtgctggtgctggtgctgctgccgcagccgctgccggaggtgcgggagcaggtcaaggtggatttggtggacaaggtggatatggacaaggtggcggcgctggagcagcagctgccgctgcagctgcagccgctgcaggcggagcaggatccggtcaaggtggttatggcggacaaggtggtcttggaggctatggacaaggagctggtgctggagctgctgctgcagcagctgcaggtacgtcttc

SEQ ID NO: 881 - DNA, 521 bp, synthetic construct
  misc_feature 1..521: note = Description of Artificial Sequence: Synthetic polynucleotide
  source 1..521: mol_type = other DNA
gaagacttagcaggtggtgcgggagctggtcagggctcctatggaggacaaggtggttacggacaaggaggagccggtgccgccacagctaccgctgctgcagctggtggtgccggatccggacagggaggttatggaggtcaaggaggactgggtggctatggacaaggtgccggtgctggtgctgctgcagccgcagcagctgctgctggaggagccggcgctggtcaaggtggttacggtggtcaaggtggccagggaggatacggtcagggagccggtgcaggtgcagctgcagcagccgctggcggcgctggtgcaggtcaaggaggctacggcggacagggaggatatggtcagggtggtggtgctggagctgctgcagctgctgctgctgcatctggaggatcaggatccggtcaaggaggttacggaggtcaaggtggattgggcggttacggtcagggtgctggagccggagctggagccgctgcatcagcggcagccgcaggtacgtcttc

SEQ ID NO: 882 - DNA, 479 bp, synthetic construct
  misc_feature 1..479: note = Description of Artificial Sequence: Synthetic polynucleotide
  source 1..479: mol_type = other DNA
gaagacttagcaggtgccggatctggtcaaggtggttacggtggccagggaggactgggaggttatggacaaggtgccggtgccggcgctgcagcaggagcctcaggctcaggctctggtggcgctggtcaaggaggtttaggcggttacggccaaggtgctggtgcaggtgcggctgcagcggctgcaggagctagcggagccggccaaggaggattcggaccatatggttcctcttatcaaagtagtacatcttactcagttacttctcagggagctgctggtggactcggtggatatggtcagggttccggcgctggagccgcagctgccggtgcggcaggacaaggtggtcaaggaggatatggccaaggtgcaggagcgggtgctggagcaggtgctggacaaggtggcctgggtggatacggtcaaggtgccggttcatctgctgcatctgctgccgctgcaggtacgtcttc

SEQ ID NO: 883 - DNA, 707 bp, synthetic construct
  misc_feature 1..707: note = Description of Artificial Sequence: Synthetic polynucleotide
  source 1..707: mol_type = other DNA
gaagacttagcaggtcaaggtggtcagggaggatatggtggtttaggtcagggaggttatggtcagggtgctggttcgtctgcagctgcagcagctgccgccgccgccgcagctgccgctgcaggtaggggtcaaggtggttacggtcaaggatccggaggaaatgctgctgcggccgccgcagctgcagcagcagcagcatctggccaaggtggacaaggtggtcaaggaggacaaggtcaaggcggttatggccaaggtgcaggatcatcagctgcagcggctgccgctgctgctgctgcggctgccgctgcgggtcagggtcaaggtcgttacggtcaaggagctggtggcaacgccgcagctgctgcagctgcagcggccgccgctgctgccggtcaaggaggccaaggaggtcaaggtggtctgggccaaggtggatatggtcagggagcgggatcttcagccgctgctgccgcagcatcagctgcagcagccgccgctggtagaggtcagggcggatatggtcaaggcgctggcggtaacgcagctgccgcagctgctgccgccgctgccgcagctgccgccggtcagggtggtcaaggaggttatggtggtctaggtcaaggcggatacggacaaggtgctggatcatcagcagctgccgctgctgcagctgctgctgccgctgctgcaggtacgtcttc

SEQ ID NO: 884 - DNA, 584 bp, synthetic construct
  misc_feature 1..584: note = Description of Artificial Sequence: Synthetic polynucleotide
  source 1..584: mol_type = other DNA
gaagacttagcaggtggacagggtggtcagggacaaggtagatatggacagggtgccggatcctcggccgcagcagctgccgcagctgctgccgctgctgcagctgccggtcaaggacaaggtggttatggtcaaggtgctggtggtaatgcagccgcagctgctgctgccgcagctgcagccgccgctggtcaaggtggacagggcggacaaggtggattgggccaaggtggatacggtcaaggtgcaggctcgtctgcagcggcagctgccgctgctgctgcagctgctgcagctggacgtggacagggtggctacggacagggtgccggcggaaatgctgccgctgccgcagccgccgcagctgaggctgctgctgccggacaaggaggccaaggaggatatggaggattgggtcagggtggttacggacaaggtgctggtagttccgcagcagcagctgcagctgccgctgcagcagctgctgctggacgtggtcagggtggttatggacaaggtgcgggtggtaacgccgcagctgcagctgcagccgcggcagcagcagcagccgcaggtacgtcttc

SEQ ID NO: 885 - DNA, 608 bp, synthetic construct
  misc_feature 1..608: note = Description of Artificial Sequence: Synthetic polynucleotide
  source 1..608: mol_type = other DNA
gaagacttagcaggtcaaggtggccaaggtggctacggtggcttgggtcaaggtggttacggacaaggagctggatcatcagccgctgctgctgcagctgctgctgctgcagcagccgccggcggccagggaggtcagggacagggacgttatggccaaggagccggttcatctgcagcagctgcagcggcagctgctgctgcggccgctgctgctggaagaggacaaggtggttatggtcaaggttctggcggaaatgctgctgctgccgctgcagctgctgccgctgctgcctctggtcaaggatcacaaggcggtcaaggtggacagggtcaaggcggatacggacaaggcgcgggttcttcagcagccgctgctgcggccgccgctgccgctgctgctgcctcaggaagaggtcagggtggatacggacagggagcaggaggtaatgcagccgcagccgcggccgctgctgcagcggctgcagcagctggtcaaggtggtcaaggcggatatggtggtttgggtcaaggcggttacggacagggtgctggtagttctgctgcagcagcagccgctgcagctgccgccgcagcaggtacgtcttc

SEQ ID NO: 886 - DNA, 584 bp, synthetic construct
  misc_feature 1..584: note = Description of Artificial Sequence: Synthetic polynucleotide
  source 1..584: mol_type = other DNA
gaagacttagcaggtggacaaggtggccagggtcaaggtggttacggacagggtgctggtagttctgctgccgccgccgcagcagcagcggccgctgcagctgctgctggtagaggtcaaggaggttacggacaaggatctggaggaaacgcagcagctgctgcagctgccgctgccgccgctgcaagtggccagggaggacagggaggccaaggaggacagggacagggtggatacggtcaaggcgctggatcttcggctgctgctgcagctgcagctgctgcagccgcggcagccgctggacaaggtcaaggcggatacggacaaggtgcaggtggaaatgcagctgctgctgccgccgcagcagctgccgcagctgctggtcaaggtggacaaggtggacagggtggcttgggacaaggaggatatggtcaaggagctggtagctctgccgcagcggcagcagccgctgccgcagcagctgcagctgcaggaagaggacagggaggttatggtcaaggtgttggaggtaacgctgctgctgccgcagccgctgctgccgcggctgccgcaggtacgtcttc

SEQ ID NO: 887 - DNA, 698 bp, synthetic construct
  misc_feature 1..698: note = Description of Artificial Sequence: Synthetic polynucleotide
  source 1..698: mol_type = other DNA
gaagacttagcaggtcaaggtggtcagggtggacagggcggattgggccaaggaggttacggacaaggagcaggatcttccgcggctgcggcagctgcggccgccgctgccgccgcagctgctggcagaggtcaaggtggttatggtcagggatcaggtggaaacgcagccgctgcagcagctgccgctgctgctgccgcatctggacaaggttctcaaggaggacagggaggtcaaggtcagggaggatacggtcaaggtgctggttcctctgccgccgcagcagctgcggctgccgccgcggcagctgcttctggtagaggtcaaggaggttatggtcaaggagctggaggtaacgcagccgccgccgccgccgctgccgcagcagctgctgctgccggtcaaggtggtcaaggaggctatggtggcttgggtcagggaggttatggccagggcgcaggtagttctgctgcggccgctgccgcagccgcagcagcagctgctggaggtcagggcggacaaggccaaggaggttatggacaaggttctggaggttctgcagcagcagctgcagccgcagcagctgccgcagctgctgctgcaggaagaggacaaggtggatatggacaaggatctggtggaaatgcagcagcagcggctgctgctgccgctgcagcagccgctgcaggtacgtcttc

SEQ ID NO: 888 - DNA, 680 bp, synthetic construct
  misc_feature 1..680: note = Description of Artificial Sequence: Synthetic polynucleotide
  source 1..680: mol_type = other DNA
gaagacttagcaggtggacagggtggattttcaggacaaggacaaggaggatttggtcccggcgctggttctagcgctgctgcagcagccgcagcagccgctgctgcaagacaaggaggacaaggacagggcggatttggtcaaggagctggaggtaacgcagctgctgctgcagccgccgctgctgctgcagctgccgcccaacagggaggacagggtggcttttcaggtagaggtcaaggaggtttcggccctggtgctggatcgtccgctgcggctgctgcagctggacaaggtggacaaggccagggaggattcggtcaaggtgcaggtggtaacgcagctgccgccgccgccgctgcagccgctgccgccgctgcagctggtcagggaggtcaaggtagaggcggttttggtcaaggagccggtggtaatgccgcggcagcggccgcagccgccgctgccgctgctgccgccgctcaacagggtggtcaaggaggttttggaggacgaggccaaggaggattcggccctggagcaggttctagtgcggcagcagctgcagcaggacagggaggacaaggaagaggcggttttggacaaggtgcaggaggtaatgctgctgccgcttcagctgcagctgctgcttccgccgccgcagcaggtcaaggtacgtcttc

SEQ ID NO: 889 - DNA, 599 bp, synthetic construct
  misc_feature 1..599: note = Description of Artificial Sequence: Synthetic polynucleotide
  source 1..599: mol_type = other DNA
gaagacttagcaggtggtcaaggaagaggtggttttggacaaggcgctggaggaaacgctgccgcagcagctgctgctgcagcagccgctgcggcagctcagcaggtaggccaattcggcttcggaggtagaggacaaggaggatttggacccttcgctggatcctcggcagccgctgctgctgctgcatccgctgctgcaggtcagggcggccagggtcaaggaggattcggccaaggtgccggtggtaatgcagctgcagctgctgcagcggctgcagcagcggctagacaaggaggtcaaggacagggaggattttctcaaggtgctggtggaaacgctgccgccgccgctgccgctgccgccgctgcagctgctgctgctcaacaaggtggccaaggaggatttggtggacgtggtcaaggtggttttggtccgggcgctggttcaagcgccgctgctgccgctgctgccactgctgctgctggtcagggaggtcagggtcgaggtggtttcggacaaggtgcaggttcaaacgccgccgctgcagcagctgcagctgcagcagcagcagctgctgcaggacaaggtacgtcttc

SEQ ID NO: 890 - DNA, 512 bp, synthetic construct
  misc_feature 1..512: note = Description of Artificial Sequence: Synthetic polynucleotide
  source 1..512: mol_type = other DNA
gaagacttagcaggtcagggaggacaaggaggttacggaggtttaggccaaggaggttatggtcaaggagctggatcttctgctgccgcagctgccgctgccgcagctgcagcaggtagaggtcaaggtggttacggtcagggttccggaggaaatgccgctgcagcagccgcagcagctgctgcggcagcatccggtcagggaggtcaaggtggacaaggcggacagggccagggtggctacggacagggagccggatcatcagctgcagctgctgctgcagcagcagccgctgccgctgcagcggccggtagaggccagggtggttatggtcaaggtgctggaggaaacgctgccgcagccgctgctgctgctgccgctgctgcttcaggtcagggtggacaaggtggccagggaggacagggtcagggaggttacggtcagggcgccggctcctcagccgctgctgcggctgctgcagcagctgcagccgctgctgcaggtacgtcttc

SEQ ID NO: 891 - DNA, 560 bp, synthetic construct
  misc_feature 1..560: note = Description of Artificial Sequence: Synthetic polynucleotide
  source 1..560: mol_type = other DNA
gaagacttagcaggtcgtggtcaaggaggttatggtcagggttccggtggtaacgctgccgcggcagctgcagctggtcagggaggctttggtggtcaagagggaaatggtcaaggcgcgggaagtgcagcagcagctgccgcggcagccgctgctgcagctggtggctctggacaaggacgttacggaggtagaggtcagggcggttatggacaaggtgcgggagccgctgcctctgctgcagctgccgctgcagccgctgccgccggacaaggaggatttggtggtcaagaaggaaacggtcaaggtgcaggttcagctgctgccgcagctgcagctgctgctgccgccgcaggtggtagcggtcagggtggatatggtggtcgtggtcaaggtggatacggtcaaggcgctggagctgccgcagcagcagctgcagccgcagctgctgcagcagctggtcagggtggacagggtggtttcggatcgcaaggtggtaatggccaaggagctggttcagctgcagcggctgctgcagccgctgctgcaggtacgtcttc

SEQ ID NO: 892 - DNA, 665 bp, synthetic construct
  misc_feature 1..665: note = Description of Artificial Sequence: Synthetic polynucleotide
  source 1..665: mol_type = other DNA
gaagacttagcaggtggttacagacctgtttcaggacaacaaggcccaggtcagcaaggaccaggatcaggtggacaacaaggtcctggaggacaaagaccctacggaccaggtgctgctgctgcagctgccgctgcaggaggatatggtccgggaagtggacagggtggtccaggccagcagggcccaggctccggcggtcagcaaggtcctggtggccaaggaccatacggtcctggtgctgctgcggcagcagctgcagcagctggtggatatggtcccggttctggtcagggtggacaacaaggaccaggatcgcagggtccaggttctggcggtcagcaaggcccaggtggtcaaggcccatatggaccgtccgctgccgcggctgctgcagctgttggtggttacggtccaggcgctggtcaacagggtccaggtcaacaaggacctggatctggaggtcagagaggcccgggaggacaaggtccatatggaccaggcgctgctgcggccgctgccgcagctgcgggtggttatggtcctgcatcaggccaacagggccctggtcaacaaggtcctggttccggaggacaaagaggccctggtggtcaaggtccttatggaccaggtgccgccgccgctgcttccgcaggtacgtcttc

SEQ ID NO: 893 - DNA, 563 bp, synthetic construct
  misc_feature 1..563: note = Description of Artificial Sequence: Synthetic polynucleotide
  source 1..563: mol_type = other DNA
gaagacttagcaggtgcatcaggagccggtcaaggtcaaggttatggacagcaaggtcagggaggaagtagtgctgcagccgccgctgctgctgccgccgctgcagctgcggccgctcagggacaaggccagggttatggtcagcagggtcaaggttctgctgctgcagccgctgctgctgctgcggcgggtgcctctggcgctggtcaaggtcaaggatacggtcaacagggacaaggaagtgccgcagctgcagcagccgctgccgctgccggtgcaagtggagcaggtcaaggtcagggttacggacaacaaggtcaaggtggctcctctgctgctgctgcagcagctgctgctgccgctgcagccgctgcagcagcccaaggccaaggatatggtcaacaaggacaaggatcagctgcagccgccgcagctgcagctgctggagcatctggagctggacaaggtcaaggctacggccaacagggtcaaggcggctcttctgccgctgccgcagctgctgccgcggctgccgccgccgccgccgctgcaggtacgtcttc

SEQ ID NO: 894 - DNA, 473 bp, synthetic construct
  misc_feature 1..473: note = Description of Artificial Sequence: Synthetic polynucleotide
  source 1..473: mol_type = other DNA
gaagacttagcaggtgcttccggcgctggacaaggacagggttacggacaacaaggccaaggaggcagttctgctgctgcagctgctgcggctgccgctgcggcccaaggtcaaggacagggatacggtcagcagggtcagggctatggacagcaaggtcaaggcggttcgtctgccgcagctgcagctgccgctgctgccgctgctgcagcacagggtcagggccaaggttacggtcaacaaggacaaggatctgccgccgccgctgctgcagctgcagctggtgcttccggtgccggccaaggacaaggttacggtcagcaaggacaaggtggatccagtgctgccgctgccgctgctgctgctgctgcagcagcagccgccgcacagggtcaaggatatggacaacaaggacaaggttcagcggctgctgcagctgcggcagctgctgcagcagccgcaggtacgtcttc

SEQ ID NO: 895 - DNA, 569 bp, synthetic construct
  misc_feature 1..569: note = Description of Artificial Sequence: Synthetic polynucleotide
  source 1..569: mol_type = other DNA
gaagacttagcaggtgaggccttttctgcatcatccgctagttctgcagttgtgtttgaatctgcaggacctggtgaggaagccggtagttccggtgatggagcttctgctgctgcttcggccgctgctgccgcaggagcaggatcaggtagacgcggaccaggtggagctagatctagaggtggtgcaggtgctggcgccggtgcaggaagtggcgttggcggttacggatctggttctggcgcaggtgctggtgccggagctggcgctggagctggcggagaaggtggattcggagaaggtcaaggatatggagcgggtgccggagctggattcggatctggagcaggcgccggtgctggagccggttctggtgcaggtgcaggagaaggcgttggttctggagcaggtgctggtgctggagctggctttggagtaggtgcgggtgctggagcaggagctggtgctggattcggtagtggtgcaggtgccggttctggcgcgggtgctggatatggtgctggtagagccggaggcagaggtcgtggtggaaggggaggtacgtcttc

SEQ ID NO: 896 - DNA, 569 bp, synthetic construct
  misc_feature 1..569: note = Description of Artificial Sequence: Synthetic polynucleotide
  source 1..569: mol_type = other DNA
gaagacttagcaggtgaagctttctccgcttcatcggctagttcggctgttgtattcgaaagcgctggacctggtgaagaggccggttcttcaggtggaggagcttcagcggccgcatctgctgctgctgctgcaggagctggatctggtagaagaggtccgggtggagccagaagcagaggaggagctggtgctggtgcaggcgcgggatctggtgttggaggatatggatcgggcagcggagccggagctggcgctggtgccggtgccggtgccggaggtgaaggcggctttggtgagggtcaaggttacggcgctggtgcaggtgctggctttggttccggagctggagcgggagccggagcaggttccggtgcaggagctggagaaggagtaggtagcggtgcaggagcaggtgcgggtgctggctttggagtaggagccggtgccggagctggagcaggagctggttttggctcaggcgctggagctggatctggcgctggagcaggatacggtgctggccgtgctggaggaagaggacgtggaggcagaggaggtacgtcttc

SEQ ID NO: 897 - DNA, 572 bp, synthetic construct
  misc_feature 1..572: note = Description of Artificial Sequence: Synthetic polynucleotide
  source 1..572: mol_type = other DNA
gaagacttagcaggtagttacgcatacgcgcaggctgctgcaggtgctttcgcaaacgtcttgttccaagccggagttttaacctacgcaaatgcttctgcccttgctagcgcatatgcatcagcgtatgcctcttccgtcgcatcggcagctgcgtcagcttcggcaggagcatccgcttctagcggcgcttcggcatcagcttctgctgcagccgcagctgctgcagcggccgcagctagtgcctctgccggagcctcagcatcagcaggcgcgagtgcttcagcaggtgcttcagcgagtgcctcagcatcggccacagcatccgctttcgctagtgccttcgcatctgccgtagttcaaactggatacttttctaacgtgtttggtaatgtatattcggcagctcaagccagctattatgcttctgcgtccgcacaggctgctgcctccgctgctggttttggctcatctgtcgctaacgctgtggctagcgcttccgcttccgccgctggcggagtttcagttggagctggtgctcaagcttatgcctcagctttaggtacgtcttc

SEQ ID NO: 898 - DNA, 569 bp, synthetic construct
  misc_feature 1..569: note = Description of Artificial Sequence: Synthetic polynucleotide
  source 1..569: mol_type = other DNA
gaagacttagcaggtaatggactcggtcaagctttattggcaaacggtgtattgaatagcggaaattacctacaactggcaaattctctagcttattcctttggatcctcgctatcccaatactctagtagtgctgcgggagcttctgcagccggtgccgcatcaggagccgctggtgctggtgcaggtgctgcctcctctggaggaagttctggatctgccagtagctcgaccacaactactacaactacctccacaagtgcggcagccgccgctgctgctgccgcagccgctgcatctgcagctgcatcaacctctgccagcgcttcagcttcggcctccgcctctgcttccgccttctctcagacttttgttcaaacagttctacaatctgctgcattcggatcttatttcggtggaaatctttccctgcaatcagcccaagctgctgccagcgcagctgctcaagccgcggcacaacaaattggcttaggatcatacggttatgccctagcaaatgctgttgcatccgcttttgcctccgcgggtgcgaacgcaggtacgtcttc

SEQ ID NO: 899 - DNA, 572 bp, synthetic construct
  misc_feature 1..572: note = Description of Artificial Sequence: Synthetic polynucleotide
  source 1..572: mol_type = other DNA
gaagacttagcaggttcctatgcttacgctcaggcggctgccggagcttttgccaacgtattgtttcaagctggtgtattgacatacgccaatgcttccgccctcgccagtgcctatgcaagtgcttatgctagctctgtagccagtgctgcagctagcgcttcagcaggagcctctgcatcttcaggagctagtgccagtgcaagtgcagcagcagctgcggccgctgcagctgctgcatcagcctcagccggtgcttcagcttcagccggcgcatctgcgtctgctggtgcgtccgcctctgccagtgccagtgctaccgcctctgctttcgcatcagcttttgccagcgctgtagtccaaactggatatttctctaatgtctttggcaacgtctactccgctgcacaggcctcctattacgcatctgcctcggcccaagctgccgctagtgctgctggattcggatctagtgtagctaacgccgttgctagtgcaagtgcttctgctgcaggaggagtatctgttggtgctggtgcacaggcttatgcttctgctctaggtacgtcttc

SEQ ID NO: 900 - DNA, 569 bp, synthetic construct
  misc_feature 1..569: note = Description of Artificial Sequence: Synthetic polynucleotide
  source 1..569: mol_type = other DNA
gaagacttagcaggtaacggattgggacaggcattgctcgcaaacggcgtcttgaacagcggtaactaccttcaattggctaattccctggcttactcatttggatcaagtttgtctcagtactcttcatcggctgccggagcaagtgccgccggagctgcctccggtgccgctggtgctggagcgggagccgcttcatcaggaggatcttcaggttcggcttcatcatcaactactacgacaactactacatctacaagtgctgccgctgctgctgcagccgcagctgcagcagcctcagctgctgcctcgactagtgcttctgcctctgcatccgcttccgccagcgcgtctgccttcagtcaaacctttgtgcaaacggttttgcaatcagctgctttcggatcttacttcggtggtaacttgagtttgcaatctgcccaagctgctgctagcgcggccgcgcaggctgctgctcaacaaattggtttgggaagttacggctatgctctggcaaacgcagtggcttcagcttttgcgtcagctggcgctaacgcaggtacgtcttc

SEQ ID NO: 901 - DNA, 572 bp, synthetic construct
  misc_feature 1..572: note = Description of Artificial Sequence: Synthetic polynucleotide
  source 1..572: mol_type = other DNA
gaagacttagcaggttcatacgcctacgcgcaagctgcagccggtgcttttgcaaatgttttatttcaggctggtgttctgacttacgcaaatgcatccgctttagcaagtgcttatgcatcagcctatgcttcttcagttgcgtcggcggctgcaagcgcatctgcaggagcttcggcttcaagtggagcctctgcctctgcatcagcagctgcagctgctgcagccgctgctgccgcctcggcctctgctggagcctcagcctccgccggcgccagcgcaagtgctggagccagcgctagtgcctctgcaagtgcaactgcttctgcatttgcatctgcttttgcttccgccgtggttcaaactggctatttttctaacgtctttggtaatgtgtacagtgctgcacaagcttcatattacgcctcagcctcagctcaggccgctgcaagtgctgcgggtttcggtagttccgtagccaatgccgtggcatctgcttctgcctcagcggctggaggagtttccgtcggagccggagcacaagcttacgcatcggctttaggtacgtcttc

SEQ ID NO: 902 - DNA, 569 bp, synthetic construct
  misc_feature 1..569: note = Description of Artificial Sequence: Synthetic polynucleotide
  source 1..569: mol_type = other DNA
gaagacttagcaggtaatggactaggacaagccctattagctaatggagttctgaactcaggtaactatttgcaacttgcaaacagccttgcgtactcttttggatcctcgctgtctcaatactcaagttctgctgcaggtgcttccgcagccggagccgcttccggtgctgccggagcaggtgcaggagccgcatcatcaggtggtagctctggaagtgcttcatcctcgaccaccactactacaactacctcaacctcagctgctgcagcagcagctgcggctgccgctgctgcttcggctgcagcttctacttctgcctcagcgtctgcttctgcatcagcttcagctagcgccttctcccaaacatttgttcagactgttttacaatcggccgcatttggttcatactttggaggaaatctgtctttgcagtcggctcaagcagcagcatcagcagccgcccaagcagccgcacaacaaattggattgggttcatatggttatgctttagctaacgccgtagcatctgccttcgcctccgccggcgcaaatgcaggtacgtcttc

SEQ ID NO: 903 - DNA, 662 bp, synthetic construct
  misc_feature 1..662: note = Description of Artificial Sequence: Synthetic polynucleotide
  source 1..662: mol_type = other DNA
gaagacttagcaggtggtgctggccaaggtggctacggcggacttggtggacaaggagctggccaaggtggttacggaggtttgggtggccagggagctggacagggagccggcgctgctgcagccgcggcagccggtggtgcaggacagggtggttacggtggtttaggttctcagggtgctggacgtggaggtcaaggagccggagctgcagctgcagctgccggaggtgctggacaaggaggctatggaggtttaggatcacaaggagccggaagaggaggccttggaggacaaggtgcaggagctgccgccgccgctgcggcaggaggtgcgggtcaaggaggttatggtggtctaggtaatcaaggtgccggaagaggcggtcaaggcgcagctgccgcagctgcaggtggtgctggtcaaggaggttacggtggactaggttctcagggcgctggtaggggaggattaggtggccaaggtgctggtgctgcagcggctgcagctggtggtgctggccagggaggatacggtggactaggaggacaaggcgctggccaaggaggctatggcggtcttggttctcaaggtgctggtcgaggaggactaggaggtcaaggtgccggagctgccgccgctgccgcagcaggtacgtcttc

SEQ ID NO: 904 - DNA, 581 bp, synthetic construct
  misc_feature 1..581: note = Description of Artificial Sequence: Synthetic polynucleotide
  source 1..581: mol_type = other DNA
gaagacttagcaggtggtgccggacaaggtggtctgggtggacaaggtgctggtcagggagccggcgcttccgctgccgctgctggtggagctggtcaaggcggatatggtggactgggatctcaaggagccggtagaggtggtgagggagcaggtgcggcagcagctgctgcaggcggcgcaggtcaaggcggatacggaggactgggaggtcaaggtgcaggacagggaggttacggaggattgggttctcaaggtgcaggaagaggtggtttgggaggacagggtgccggcgccgccgcggcaggtggtgccggtcaaggaggtcttggaggtcagggcgctggacaaggtgccggagctgcggccgccgccgctggaggcgccggacaaggaggctatggtggtttaggttcacaaggtgctggtagaggaggattgggtggtcaaggtgctggtgctgttgccgctgcagcagccggcggtgcaggacaaggtggttatggtggtttaggatctcaaggagcaggtcgtggcggtcagggtgcaggagcagctgccgctgcggcaggtacgtcttc

SEQ ID NO: 905 - DNA, 587 bp, synthetic construct
  misc_feature 1..587: note = Description of Artificial Sequence: Synthetic polynucleotide
  source 1..587: mol_type = other DNA
gaagacttagcaggtggtgcaggtcaaagaggttatggaggactaggtaatcaaggagctggtcgcggaggattaggaggtcaaggagctggtgctgccgccgctgctgctgctggaggtgcaggacagggtggatacggtggtcttggtaatcagggagcaggtcgaggtggacagggcgccgcggctgccgctggtggagccggacaaggtggttatggtggcttaggtagtcaaggtgctggtagaggaggtcagggagctggagctgctgccgccgcagcagtaggagctggtcaagaaggtatcagaggacaaggagctggtcagggtggttatggaggcttaggatctcagggtagcggtagaggaggattaggtggtcaaggagcaggtgctgccgctgccgctgctggtggagctggacaaggtggtttaggtggtcaaggtgcaggccagggagccggtgccgctgcggcagctgctggtggtgttagacagggaggctatggtggcttaggatcccagggtgctggccgaggtggtcagggagcaggtgctgcagcagccgctgcaggtacgtcttc

SEQ ID NO: 906 - DNA, 671 bp, synthetic construct
  misc_feature 1..671: note = Description of Artificial Sequence: Synthetic polynucleotide
  source 1..671: mol_type = other DNA
gaagacttagcaggtcccggtggctatggacctggtcaacagggtcctggaggttatggtcccggtcaacaaggacctggaagatacggtccaggtcaacaaggaccatcaggtccaggaagtgcagccgcggctgctgctggttccggacaacagggacctggcggctacggaccacgtcaacagggtcccggtggttatggtcaaggccaacaaggtccatctggtccaggctcagctgcagcagcatctgctgcagccagcgctgagtcaggtcaacaaggtcccggtggatatggtccaggacaacaaggccctggtggatatggaccaggtcaacagggtccaggcggatacggccctggccagcaaggaccgtccggaccaggttctgcggccgctgcggctgcagctgcctcaggtcctggtcagcaaggtccaggaggctatggtcctggacagcaaggtccgggaggatatggacctggacaacaaggaccttctggacctggctctgctgcagcggctgctgccgcggcgtcgggtccaggacaacagggccctggaggatacggtccaggacagcaaggtccaggtggttatggtcctggtcagcagggactgtctggtcctggatctgctgctgctgcagcagctgcaggtacgtcttc

SEQ ID NO: 907 - DNA, 659 bp, synthetic construct
  misc_feature 1..659: note = Description of Artificial Sequence: Synthetic polynucleotide
  source 1..659: mol_type = other DNA
gaagacttagcaggtcctggacaacaaggccctggcggatatggaccgggtcaacaaggaccatccggacctggttccgcagctgctgccgccgctgcagctgctggtcctggaggatacggtcctggtcagcaaggtcctggaggctacggaccaggacaacagggtccatccggagctggttctgcagctgctgctgcagctgcaggccctggacaacaaggattaggtggttacggaccaggacagcagggacctggtggatacggtccgggacaacaaggtccaggtggttatggacctggttctgcatctgccgctgccgccgctgctggtccaggccaacaaggacccggtggatacggccctggtcagcagggaccttccggtccaggatcggcttccgccgctgctgctgcggcggctgccggtccaggaggttatggtccaggtcagcaaggtccgggaggttatgcaccaggacaacaaggtccttccggtcctggttccgcttccgctgccgcagctgctgctgccgctggtccaggtggatacggacctggtcaacaaggacctggaggctatgctcccggtcagcaaggtccatccggtcctggatctgccgcggctgctgccgcagccgccgcaggtacgtcttc

SEQ ID NO: 908 - DNA, 647 bp, synthetic construct
  misc_feature 1..647: note = Description of Artificial Sequence: Synthetic polynucleotide
  source 1..647: mol_type = other DNA
gaagacttagcaggtcgaggacccgaaggatatggacctaggcaacaaggtcccggagctacggctgctgctgctggacctggtggatacggcccacgacaacagggaccaggaggatatggaccaggtcagcagggaccaggtgcagcagctgccgccgctgccggtagaggaccaggtggatacggtccaggtcaacaaggaccaggtggtccaggagctgctgctgcagctgctggtagtgaaggatacggacctggtcagcaaggtcctagaggcccaggagctgctgcagctggacctggaggatacggtcctggacaacagggtgcatcagctgcagcttccgcagctgcaggaagaggacctggtggatatggacctggacagcaaggacctggaggacctagtgctgccgcagccggtcctggtggttacggtcctggtcagcaaggaccaagtgctgcagcagctgctgctgctggttctggtcctggcggttacggaccaggccagcaaggtccaggaggtcctggtgctgcagctgccgccgcgggaccaggcggatacggtccaggacaacagggtcccggtgctgcagcagcagccgccggacaagcagcggccgcggcagcaggtacgtcttc

SEQ ID NO: 909 - DNA, 698 bp, synthetic construct
  misc_feature 1..698: note = Description of Artificial Sequence: Synthetic polynucleotide
  source 1..698: mol_type = other DNA
gaagacttagcaggtagaggaccaggaggttatggtccaggtcagcagggaccgggtggacctggagcagctgcagcggctgccggtcccggaggttatggaccaggtggttacggtccaggtcaacaaggtcctggtggtccaggagccgctgccgctgctgccgccggccgcggtccaggtggttatggtccaggacaacaaggtcctggccaacaaggcccaggtggttccggtgctgcagctgcagctgcgggaagaggtccaggtggatacggaccgggtcaacaaggccctggtggaccaggtgccgccgccgctgctgctggtccaggtggatatggtcctggtcagcagggacctggtgctgctgcagcagccgccgcagctggtagaggtcccggtggatatggtccgggccagcagggaccaggaggccctggtgccgcagctgctgctgccgctggacgtggaccgggtggatacggtcctggtcagcaaggaccaggtcaacagggtccaggcggttccggtgcagctgccgctgccgctggaagaggaccaggcggatatggtcctggacaacaaggacctggaggacctggtgccgccgcagcagctgcaggtcctggaggatatggacctggtcaacaaggaccaggagcagcagcagccgccgccgctgcaggtacgtcttc

SEQ ID NO: 910 - DNA, 698 bp, synthetic construct
  misc_feature 1..698: note = Description of Artificial Sequence: Synthetic polynucleotide
  source 1..698: mol_type = other DNA
gaagacttagcaggtcgtggtccgggaggatacggtccaggacagcaaggtccgggtggatctggcgccgcagcagctgctgctggaagaggtccaggaggttatggtccaggacagcagggaccaggtggtccaggagcagctgcagccgctgctggtcctggtggttacggtccaggacaacaaggcacgggtgctgcggctgccgcagcagctggttctggtgccggaggttacggtcctggacagcagggcccaggtggtcctggtgctgccgcagcagcagctggacctggaggatacggccccggacagcaaggcccaggtgcagcagccgctgccgctgctggaagtggtccaggcggatatggtccaggtcaacaaggtcctggtggttcttctgctgccgccgcagccgcaggtccaggtagatacggaccgggtcagcaaggtccaggtgcagccgctgctgcttctgctggccgtggtccaggaggttacggtccgggccaacaaggtccaggcggtcctggtgccgctgctgcagctgccggtcctggaggttatggccctggtcaacaaggccctggagccgctgctgccgctgctgcaggatcaggtccaggcggatacggacctggtcagcaaggtcccggaggtccaggagctgcagctgccgcagctgcaggtacgtcttc

SEQ ID NO: 911 - DNA, 671 bp, synthetic construct
  misc_feature 1..671: note = Description of Artificial Sequence: Synthetic polynucleotide
  source 1..671: mol_type = other DNA
gaagacttagcaggtcgtggtcctggtggctatggacaaggtcagcaaggacccggcggacctggcgcagcagctgccgcggccggtccaggtggttatggacctggacaacaaggacctggagcagcagcagctgcagccgctggatctggccctggtggatatggacctggtcagcaaggaccaggacgttcaggtgcagctgctgcagcagccgcagctggtcgtggtccaggtggatatggtccaggacagcagggcccaggaggccctggtgccgcagcggccgctgccggtcctggtggttatggtccaggccaacaaggtcctggtgcagctgcagcagctagtgctggtcgaggacctggtggatatggtcctggacaacaaggtccgggtggatccggagccgctgctgctgcagccggtagaggtcccggtggatacggtccgggtcaacaaggtccaggtggtcctggagctgctgctgcagctgccgctggccgtggtccaggtggctacggaccaggtcaacaaggccctggtcagcagggtcctggaggaagcggtgctgcggctgccgccgctggtcgtggccctggcggatacggtccaggtcaacagggaccaggtggtccaggtgctgctgctgctgccgcaggtacgtcttc

SEQ ID NO: 912 - DNA, 695 bp, synthetic construct
  misc_feature 1..695: note = Description of Artificial Sequence: Synthetic polynucleotide
  source 1..695: mol_type = other DNA
gaagacttagcaggtcctggaggttatggtcctggtcaacaaaggccaggacaacagggccctggaggtccaggagccgctgccgctgcagcaggtcgcggtcctggaggatatggtcctggacagcaaggccctggaggtcctggtgccgctgcggcagctgcagccggaaggggacctggtggatacggacctggacaacaaggacctggtcaacaaggtccaggcggttcaggtgctgcagcagctgcagctggccgaggacccggcggatatggaccaggtcagcagggaccaggaggacctggcgccgctgccgctgctgcaggacctggaggatacggaccaggacaacaaggtcctggtgctgctgctgccgccgctgcagcaggaagaggaccgggtggatatggaccgggacaacaaggtccaggaggaccaggagcggcagcggctgcagcagctggaagaggccctggcggttatggtcccggtcagcaaggacctggtcagcagggtccaggtggtccgggtgccgctgcagcagcagccggacctggtggttatggaccgggtcaacaaggtaccggagctgctgctgctgcggctgccggttcgggagctggtggatatggaccaggacagcaaggtcctggaggccctggagcagctgcagcagctgcaggtacgtcttc

SEQ ID NO: 913 - DNA, 632 bp, synthetic construct
  misc_feature 1..632: note = Description of Artificial Sequence: Synthetic polynucleotide
  source 1..632: mol_type = other DNA
gaagacttagcaggtccaggcggttacggtccaggacaacagggaccgggcgctgcagctgctgctgcagctggttctggtcctggtggttacggacctggccagcagggacctggcggaagcagcgctgccgctgccgctgccggacctggaagatacggtccaggtcaacaaggtccgggtgctgccgctgcagcagctgctggatcaggtccaggtggttatggtccaggtcagcaaggtccaggtggtcctggagcagctgccgctgctgccgctgccggtagaggtccaggaggatacggacctggtcaacagggacctggtggtccgggagctgctgcagccgctgctggacctggaggttatggaccaggacagcaaggacctggtgccgccgctgctgctgctgctggtagcggtccaggcggatatggtcctggtcagcaaggtccgggtggaccaggcgcagctgccgcagctgccgcgggaaggggacctggcggttacggtcaaggccagcaaggaccaggaggacctggagctgccgcagcagctgcaggtcctggtggatatggtcctggacagcagggtccaggtgctgctgctgctgcagcagcaggtacgtcttc

SEQ ID NO: 914 - DNA, 584 bp, synthetic construct
  misc_feature 1..584: note = Description of Artificial Sequence: Synthetic polynucleotide
  source 1..584: mol_type = other DNA
gaagacttagcaggttcaggaccgggaggttatggtccaggtcaacagggacccggtcgatctggtgctgcagcagcggctgcagctgcaggcagaggtcccggtggatatggtccaggccagcaaggacctggtggtcctggtgccgcagctgctgccgcaggaccaggtggttatggacctggccaacaaggtccaggtgctgccgccgctgcttcagccggtagaggaccgggtggttacggaccaggtcagcagggacctggaggttcaggtgcagctgcagcagctgctggacgtggccctggaggttatggaccaggacagcaaggcccaggcggaccaggagcagctgctgctgccgctgctggtactggaccaggaggatatggtccaggtcagcaaggtcctggaggctccggtgctgctgccgcagcggctggtaggggtccaggtggttacggacctggacaacaaggaccaggtggtcctggagctgcagcggctgcggctggcccaggaggatatggaccaggtcaacaaggacctggcgctgctgctgctgcggcagcaggtacgtcttc

SEQ ID NO: 915 - DNA, 545 bp, synthetic construct
  misc_feature 1..545: note = Description of Artificial Sequence: Synthetic polynucleotide
  source 1..545: mol_type = other DNA
gaagacttagcaggtagcggaccaggaggttacggaccaggccaacagggaccaggtggaccgggcgctgcagccgccgccgctggaagaggaccaggtggttatggtcctggtcagcagggaccaggtggtccaggtgcggccgctgctgctgccgcaggacgaggacctggaggatacggtcctggccagcaaggacctggtggttccggtgctgccgctgccgctagtggtaggggtccaggtggtagtggtcctggtggatacggtcccggtcaacagggaccaggagcagccgctgctgctgctgctgcaggtagaggtcctggaggttacggacctggtcagcaaggacctggaggtccaggtgctgccgctgctgccgcagccggtagaggtccgggaggatatggtcctggacaacaaggtcctggtggttctggagccgccgctgctgccgctggaagaggtcctggtggctatggtcccggtcaacaaggacctggcggacctggtgctgcagctgccgcagcaggtacgtcttc

SEQ ID NO: 916 - DNA, 491 bp, synthetic construct
  misc_feature 1..491: note = Description of Artificial Sequence: Synthetic polynucleotide
  source 1..491: mol_type = other DNA
gaagacttagcaggtccaggaggttatggtcccggtcaacaaggtcctggagccgctgccgctgcagcaggtagaggacctggcggctatggacctggacaacagggcccaggcggttctggagctgccgcagctgccgcgggaagaggtccaggtggttatggtccaggacaacaaggacctggtggtcctggagctgccgctgcagctgcaggtcccggcggatacggaccaggacagcagggtaccggtgctgctgctgccgcggccgctggttctggtgccggtggttatggtcctggtcaacaaggaccaggaggtcctggagctgctgctgcagctgctggaccgggtggctatggaccaggccagcaaggccctggtgccgccgccgctgctgccgcaggtagtggcccaggcggttatggtccaggtcaacagggacctggtggacctggtgctgctgccgcagcagctgcaggtacgtcttc

SEQ ID NO: 917 - DNA, 548 bp, synthetic construct
  misc_feature 1..548: note = Description of Artificial Sequence: Synthetic polynucleotide
  source 1..548: mol_type = other DNA
gaagacttagcaggtggtgccggtcaaggaggttactctggacttgatagacagagatctggcgccgctgccgctggagcatcagtggcagctcagggtggttacggtggtcttggaggccaaggagccggtgcagctggcgctgctgccgcaggtggtgctggtaggggtggatatggtggtttggttggtcaaggagctggtgctgctgctgctggtgctggagaagccggacagggaggctatggatctttgggtggacaaggtaccggtgcaggtggcgaggctgctgctgcaactggaggcgctggtcagggcggttacggtggactaggtggccaaggtgcttctgcagccggatcagccggtcaaggtggttatggtggattggccggacaaagagcaggagctgctgccactggcggtttgtttgatggatctagagatgttggtggtttctcattcgcagtttctggttcttcaggtggctaccgtagaggaggttacgttggtaatagcacagccgctgcagctgcaggtacgtcttc

SEQ ID NO: 918 - DNA, 554 bp, synthetic construct
  misc_feature 1..554: note = Description of Artificial Sequence: Synthetic polynucleotide
  source 1..554: mol_type = other DNA
gaagacttagcaggtggtgcgggtcaaggcggttacggaggattaggaggtcaaggagccggtgctgctgctgccgctgcaggaggagccggacagggaggttacggtggtcaaggtgccggacaaggagcggctgccgctgcagcatcaggtgctggtcaaggaggctatgaaggtcctggtgcaggacaaggagctggtgctgcagctgccgcagccggtggtgccggccagggaggatatggtggtttgggcggacagggcgccggccaaggagctggtgcagccgcagccgccgctggcggtgccggacaaggtggttacggtggtcttggtggtcagggagcaggtcagggtgcaggagccgctgctgctgctgctggaggagctggtcaaggcggatatggaggtcaaggcgcaggtcaaggcgcagcagcagcagccgctggtggagccggacagggtggttacggcggcctaggttcaggacaaggaggttatggacgtcagggagctggtgccgcagccgcagcggccgctgcaggtacgtcttc

SEQ ID NO: 919 - DNA, 545 bp, synthetic construct
  misc_feature 1..545: note = Description of Artificial Sequence: Synthetic polynucleotide
  source 1..545: mol_type = other DNA
gaagacttagcaggtggagcaggccaaggtggatacggcggtttgggcggccaaggtgctggcgccgctgctgcagctgctggtggagctggacaaggaggatacggtggtcaaggagccggtcaaggcgctgctgctgcagcagcctctggagccggacagggtggatatggcggtccgggcgccggtcagggcgcaggtgctgcagccgctgcagctggcggagctggtcagggcggttacggtggactcggtggacaaggagctggccagggagccggtgctgctgcagccgccgcaggtggagctggccaaggtggttacggaggtcaaggcgccggacaaggtgctgccgcagctgctgctggtggtgctggacaaggtggttacggtggtttaggatccggtcaaggtggatatggtggtcaaggtgccggagcagcagccgcagctggcggagccggacagggaggatatggaggtttgggtggacaaggcgctggccaaggagcaggtgcagcagccgccgctgcaggtacgtcttc

SEQ ID NO: 920 - DNA, 467 bp, synthetic construct
  misc_feature 1..467: note = Description of Artificial Sequence: Synthetic polynucleotide
  source 1..467: mol_type = other DNA
gaagacttagcaggtggctacggtcctggtagcggtcagcaaggcccaggcgctggtcaacaaggtcctggtgcaggacagcagggaccatatggaccatctgctgcagcagcagcggctgctgctggcggttacggccctggaggagctggtcagcagggaccaggtgccggtcaacaaggacctggatcacagggtcagtccggtcctggtgccactgtcgctgctgctgctgccggaggatatggcccaggtggtgccggacagcaaggtcctggagctggacaacaaggtcagggatctcaaggaccttatggaccagcggctaccgccgctgccgctgctgctggtggttacggaccaggaagtggccagcaaggtccaggagccggtcaacaaggtccaggaggacaaggaccatatggtccatctgccgctgcagctgctgctgccgcaggtacgtcttc

SEQ ID NO: 921 - DNA, 461 bp, synthetic construct
  misc_feature 1..461: note = Description of Artificial Sequence: Synthetic polynucleotide
  source 1..461: mol_type = other DNA
gaagacttagcaggtggatatggtcctggtagtggacaacaaggacctggagccggtcctcaaggaccaggttctcagggtccgtatggtcctggagcagccgctgccgctgcagctgtgggtggctacggtcctggatctggtcaacagggaccaggtgcaggtcaacaaggtccaggcggacaaggcccatacggaccaagttctgcagcggccgctgctgcagccggtggatacggtccaggaggagcaggtcagcaagtaccaggtgccggccaacagggtccaggaaatcagggtccatcaggacctggagctgcagcagctgctgctgctgccggaggttacggccctggaggtgctggtcaacagggcccagctgcaggccaacagggacctggctcacaaggatcgtatggaccgggtgctgcagccgctgcagctgctgcaggtacgtcttc

SEQ ID NO: 922 - DNA, 602 bp, synthetic construct
  misc_feature 1..602: note = Description of Artificial Sequence: Synthetic polynucleotide
  source 1..602: mol_type = other DNA
gaagacttagcaggtggtcttggaggtcagggaggtctgggtggactaggtagtcaaggagctggtttgggcggctatggtcaaggtggtgctggccaaggaggagctgcagcagctgctgctgccgccggtggtttaggaggacaaggaggtagaggaggtttaggctcccaaggtgcaggccaaggaggttatggtcagggaggagctggccaaggaggtgctgctgccgcagctgcagcggccggtggactaggaggtcaaggtggactgggagcccttggaagccagggtgccggccaaggtggcgctggtcagggtggttacggacaaggaggcgcagccgcagctgctgctggaggcctcggaggtcagggtggtctaggaggattgggttctcagggagccggacaaggtggatatggccaaggtggcgccggtcaaggaggagctgccgctgctgcagcagcagctggtggtttaggtggtcaaggcggtctgggcggtttaggttcccaaggagccggtccgggaggttatggacaaggtggtgcaggtcaaggtggagcagctgccgccgctgccgcggcaggtacgtcttc

SEQ ID NO: 923 - DNA, 521 bp, synthetic construct
  misc_feature 1..521: note = Description of Artificial Sequence: Synthetic polynucleotide
  source 1..521: mol_type = other DNA
gaagacttagcaggtggtttgggcggtcaaggtggtttaggcgctcttggcagtcaaggtgctggtcaaggcggctatggacagggtggagctggccaaggtggtgctgcagccgcagctgccgctggtggactaggtggtcaaggcggacttggtgctttaggtagtcaaggtgccggacaaggtggttacggccaaggaggttcacaaggtgccggccagggtggttatggacaaggtggcgctgctgcagccgccgctgctgcaggtggcctcggtggtcaaggtggacttggtggactaggaagtcagggagccggacaaggaggttacggacagggtggtagccagggtgctggacaaggaggtgcagctgctgctgctgctgcagctggtggtctgggaggtcagggaggcttcggtggtcttggatctcagggcgccggacagggtggctatggacaaggtggagcaggacaaggtggtgctgctgccgccgctgcggcagcaggtacgtcttc

SEQ ID NO: 924 - DNA, 746 bp, synthetic construct
  misc_feature 1..746: note = Description of Artificial Sequence: Synthetic polynucleotide
  source 1..746: mol_type = other DNA
gaagacttagcaggtgcaggagctggtcagggcggacgaggcggctacggtcaaggaggatttggaggacaaggctccggtgcaggtgctggtgcaagcgcagctgcaggtgcaggagctggccaaggtggaagaggaggttacggacagggtggtttcggtggtcaaggttccggtgccggagctggagcttccgctgcagctggagctggtgctggtcaaggaggtagaggaggctacggacaaggcggttttggcggacaaggttcaggtgccggtgctggcgctagcgccgcagctgctgccggtgcaggacaaggtggaagaggcggttacggtcaaggtggacttggtggttcaggatctggtgctggagccggtgctggtgctgctgccgccgcagctgctggcgcaggaggttatggacaaggtggattaggtggttacggccaaggcgccggcgctggacagggcggcctcggaggttacggatcaggagcaggagccggtgcctcagccgctgcggctgcaggtgccggaggtgctggacaaggaggtttgggtggttatggtcagggcgcaggtgccggtcaaggtggtctgggtggttatggcagcggtgctggtgcaggagcagcagccgctgccgcagccggagccggaggctctggtcaaggaggactcggtggttatggctctggaggtggagctggaggagcaagtgccgctgctgcaggtacgtcttc

SEQ ID NO: 925 - DNA, 521 bp, synthetic construct
  misc_feature 1..521: note = Description of Artificial Sequence: Synthetic polynucleotide
  source 1..521: mol_type = other DNA
gaagacttagcaggtgcgtctgattcagcagcagctgcagctttatctgctgctagcgcaagtgcagcatctgccgcgacagctgttagtactacaacatcaacttccacgtcagcagctactgccgccgcagctgccgcttctgctgcaggcgctgctggcgcaggagctgccgccggtgcaactgcctcaagctccttcggccaaaatttgctttccggcttgctgagatccgacgccgtcgtctccgccctttcacaggcttattctgcatcaactgcatccgccctagcatcatcttacgctcaatcaggagctgatcgtgctggattcggcaattatggatctgtgattgctagcgccgcggctagcgctgttgcttctgcaggaaacaacgctggtgcctatgcctatgcaagagcctatgcatcagctatctcacaatctctttcaagccttggaattcttaattcaggtaatgcaattgctttggccaacgctttcagttcaggtacgtcttc

SEQ ID NO: 926 - DNA, 521 bp, synthetic construct
  misc_feature 1..521: note = Description of Artificial Sequence: Synthetic polynucleotide
  source 1..521: mol_type = other DNA
gaagacttagcaggtgcttctgattcggctgcggctgctgctgtttctgccgcttctgcttctgcggcatccgcagccactgcgagtagtaggacgacgagtacttcaacttcagctgctactgcagctgctgccgctgctagtgctgcaggctcagcaggtgcgggagcagctgcaggagctaccgccagtagttccttcggtcaaaatttgctgtctggactgctccgtagtgacgcagtggtgagtgcactatcacaagcctattcggcttctactgcaagcgcactagcttcctcttacgctcaatccggtgccgatcgtgccggtttaggtaattatggaagtgtgattgcctctgccgcagccagtgccgttgcgtcagctggtaataacgctggagcgtatgcttacgctcgcgcatacgcctcggctatatctcaaagtttgagctcgctgcgaattctaaactctggaaacgccattgccctagcaaatgcattctcatcaggtacgtcttc

SEQ ID NO: 927 - DNA, 521 bp, synthetic construct
  misc_feature 1..521: note = Description of Artificial Sequence: Synthetic polynucleotide
  source 1..521: mol_type = other DNA
gaagacttagcaggtgcttcagactcggctgcagctgctgctttgagtgctgcctcggcaagtgcagctagcgctgctactgctgcttctactactactagcacatcgacttctgcggcaacagctgcagcagcagctgcatcagccgccggagctgctggtgcgggtgcagcggctggtgctacagccagttcttcatttggacaaaacctactcagtggattgttaagatcggacgccgtcgtgtccgctctttcccaggcatattcggcaagtacagcttctgccctcgcatcatcctatgctcagagtggtgctgatagagcaggcctaggtaactacggatcagtgatcgctagtgctgctgcctctgctgttgcttctgctggtaataatgctggtgcttacgcgtatgctagagcttatgcatccgccatcagccagtcattgtcatcactcggtattctaaactctggaaatgctatcgcactagctaacgcttttacttcaggtacgtcttc

SEQ ID NO: 928 - DNA, 545 bp, synthetic construct
  misc_feature 1..545: note = Description of Artificial Sequence: Synthetic polynucleotide
  source 1..545: mol_type = other DNA
gaagacttagcaggtggattgggtggtggacagggtgcaggtcaaggtggacagcaaggcgctggacaaggtggctatggtagcggactgggtggtgccggccaaggagctggacaaggagctagtgcagctgctgccgctgctgccggtggtctaggtggaggtcagggtgcaggccaaggtggtcaacaaggtgctggacagggaggttatggatctggactcggaggtgctggtcaaggcgcttcagccgctgcagctgccgccgcagccggtggattaggtggaggccagggtgccggacaaggaggacaacaaggagcaggacagggaggatacggttcaggtctaggtggagctggacaaggtgcttcagctgctgcagctgctgctgcagctggtggtttgggtggaggtcagggagcaggccaaggaggccagcaaggtgctggtcagggtggttacggatcaggtttgggaggcgctggtcaaggagcaggtcaaggtgctagtgcggccgctgctgctgccgcaggtacgtcttc

SEQ ID NO: 929 - DNA, 554 bp, synthetic construct
  misc_feature 1..554: note = Description of Artificial Sequence: Synthetic polynucleotide
  source 1..554: mol_type = other DNA
gaagacttagcaggtggttctggaggtcaaggaggacagggcggttatggatccggaggtcaaggtcagggacaaggtggttatggaagcggagccgctgcagccgcagctgccgcagctggaggatcaggtggtcaaggtggtcagggaggttacggatctggcggacagggtcaaggtcagggtggttacggcgcaggtgctgcagcagcggctgcagccgccgcaggtggttccggtggtcaaggcggagccggtgctggtggccaaggcggacaaggtcaaggacagggtggttatggttctggagccgctgctgccgctgcagccgctgctggtggactcggaggacaaggtggatacggttctggtagacaaggtcagggtcaaggtggttacggctcaggtgcggccgccgctgcagctgcggctgctggtggcagcggaggtcagggtgcccaaggtggatacggatccggtggtcaaggacaaggtcagggaggatatggttccggtgccgctgctgctgccgccgctgccgcaggtacgtcttc

SEQ ID NO: 930 - DNA, 614 bp, synthetic construct
  misc_feature 1..614: note = Description of Artificial Sequence: Synthetic polynucleotide
  source 1..614: mol_type = other DNA
cgcgccttagcgatggtctcaaggtggttacggtccaggcgctggtcaacaaggtccaggaagtggtggtcaacaaggacctggcggtcaaggaccctacggtagtggccaacaaggtccaggtggagcaggacagcagggtccgggaggccaaggaccttacggaccaggtgctgctgctgccgccgctgccgctgccggaggttacggtccaggagccggacaacagggtccaggtggagctggacaacaaggtccaggatcacaaggtcctggtggacaaggtccatacggtcctggtgctggtcaacagggaccaggtagtcaaggacctggttcaggtggtcagcagggtccaggaggacagggtccttacggcccttctgccgctgcagcagcagccgctgccgcaggaggatacggacctggtgctggacaacgatctcaaggaccaggaggacaaggtccttatggacctggcgctggccaacaaggacctggttctcagggtccaggttcaggaggccaacaaggcccaggaggtcaaggaccatacggaccatccgctgcggcagctgcagctgctgcaggtacgtcttcatcgctatcctgca

SEQ ID NO: 931 - DNA, 425 bp, synthetic construct
  misc_feature 1..425: note = Description of Artificial Sequence: Synthetic polynucleotide
  source 1..425: mol_type = other DNA
cgcgccttagcgatggtctcaaggtggatatggcccaggagccggacaacagggtcctggttcacaaggtccaggatctggtggtcaacagggaccaggcggccagggaccttatggtccaggagccgctgcagcagcagcagctgttggaggttacggccctggtgccggtcaacaaggcccaggatctcagggtcctggatctggaggacaacaaggtcctggaggtcagggtccatacggaccttcagcagcagctgctgctgcagccgctggtggttatggacctggtgctggtcaacaaggaccgggttctcagggtccgggttcaggaggtcagcagggccctggtggacaaggaccttatggacctagtgcggctgcagcagctgccgccgcaggtacgtcttcatcgctatcctgca

SEQ ID NO: 932 - protein, 147 aa, Aliatypus gulosus
GAASASGAASASGAASASEAASSSSTTITTKGTSASGLLSSPYGSVSISVENRIISLISSILSEFISIESAFNYSSFAKKLAFLASEISVSNPGLSASEVISEVLLETVTALIHILASSQVGSVSTADLSSVSRAFAQSFAQAFAHQ

SEQ ID NO: 933 - protein, 180 aa, Aptostichus sp.
GAAATSSSTTAASSAGSSSSVSSISAGVSSDAGGAYLSGDVSEFGSSGSLPQAVLPLSQWPGTGSSGADLLISDLLSLRDGLLSSSASERISAIILPLVSALSPTGVNFSEIGNIILSLISKISGSCVGLSPSQTFSEALLEVIIALMQILSSAKVTTVSTSASGTARSLAQSLSSAMAG

SEQ ID NO: 934 - protein, 170 aa, Aptostichus sp.
GASSTTTTTEATGSDASARRISSGASSETAASSVVDSSVFSGDVSDYSGFNVLPLVSDLLSSSSGLSSPAAIRRIDSLIPLLFSSASSNNLSASFLSNVLATSVSQISEGSSGLSATQIIIEALFELISGLMHILTSAHFDAVSRATSSATASALANSLSTAFSGVNNIA

SEQ ID NO: 935 - protein, 152 aa, Araneus diadematus
GAGARAAGGYGGGYGAGAGAGAGAAASAGASGGYGGGYGGGAGAGAVAGASAGSYGGAVNRLSSAGAASRVSSNVAAIASAGAAALPNVISNIYSGVLSSGVSSSEALIQALLEVISALIHVLGSASIGNVSSVGVNSALNAVQNAVGAYAG

SEQ ID NO: 936 - protein, 145 aa, Araneus diadematus
GGQGGQGGYGGLGPQGAGGAGQGGYGGGSLQYGGQGQAQAAAASAAASRLSSPSAAARVSSAVSLVSNGGPTSPAALSSSISNVVSQISASNPGLSGCDILVQALLEIISALVHILGSANIGPVNSSSAGQSASIVGQSVYRALS

SEQ ID NO: 937 - protein, 154 aa, Araneus diadematus
GGYGPGSGQQGPGQQGPGQQGPGGQGPYGPGAASAAVSVGGYGPQSSSVPVASAVASRLSSPAASSRVSSAVSSLVSSGPTKHAALSNTISSVVSQVSASNPGLSGCDVLVQALLEVVSALVSILGSSSIGQINYGASAQYTQMVGQSVAQALA

SEQ ID NO: 938 - protein, 134 aa, Araneus diadematus
GSGPGGYGPGSQGPSGPGYQGPSGPGAYGPSPSASASVAASVYLRLQPRLEVSSAVSSLVSSGPTNGAAVSGALNSLVSQISASNPGLSGCDALVQALLELVSALVAILSSASIGQVNVSSVSQSTQMISQALS

SEQ ID NO: 939 - protein, 201 aa, Atypoides riversi
GSATSSTTTTTTVSKSAAAAAAAAAAASSASSASRDSDRSSSAAKAYASSSANASSNFENYQTSDLSRPYATSSNAPASTSGIKNDLSPLISGLISSSSGLGSSDASDRISYLLTSLLSVINSEGGRIDFAAVANILVSLVSEIRAKNSELSYFHILIEALFEVLSAVLQIISSSHIVIGNASFSSSSNLAFADACAKAFS

SEQ ID NO: 940 - protein, 187 aa, Bothriocyrtum californicum
GSAEASSVARLSSASNDVYGPTAEEFGASGSALGVSQYGEFGGLDEVSGPALQSTSPPFLPLTSDIGRFSPEISRLLSSPSGLTSEAAKERISSIIASLLSAKSSQDFNALLLSNILPSLISKISQRASGLSPTEMVTEALLEVLAGCMEILSSFNVGAQSISSSRTSSNALVQSISNQFSGLNAAA

SEQ ID NO: 941 - protein, 172 aa, Bothriocyrtum californicum
GASSAESRTSAAQSGTSGSALGVSLYGGSGSFYQGTAPELLSTSPASSPVVSDIGPELSSLLSAPTGLTSEAAKERIASIIPSLLSAISPNEFDAVLLSDSLASLISQISQSGSGLSTSQIAMEALLEVLAGCMEILSSSNVGAASVSSSRASSNALVQSISNAFSGLNAAA

SEQ ID NO: 942 - protein, 179 aa, Bothriocyrtum californicum
GRAVASGAAGSGASSAARSGASGSASGVAKYGGYGGSSDLSGPAFPKISPVSLPHIPDGRPFLPVTSDLLSSPADLTSPAANQRITSIIPILRSGISPKGFDASLLADSLSSLISEISQSASELSASDVLTEALLELVSAFLQILSSDAGSVGISSSTAFSNALAQSVSNAFYGLNTVA

SEQ ID NO: 943 - protein, 152 aa, Deinopis spinosa
GAGVGAGVGAGAGAGFGAGVGAGVGAGYGAGLGAGSGVGYGSGSSIVSTSGGDFSTTLSSASSVLASPQSVTRVSALVPNLISGGSFNSNAVSAVLPGLTSQIKAATGSNGCDSFVIALLEIVSALGHLLNNSMINVNAASVPVSPPQWLYS

SEQ ID NO: 944 - protein, 177 aa, Deinopis spinosa
GAGVGAGAGAGAGAGVGAGFGAGVGAGVGAGAGAGVGAGVGAGAGAGFGAGVGAGVGAGVGAGYGAGLGSGVGASFGGDFRTTLSSASSVLASPQSLTRVNTLVPSLISGGSFNSNAVSRALSDLNSQNRAAGSTGCDSTIQTLFEMVSAMDHILKNSIISDTAASVPVSPPQWLYS

SEQ ID NO: 945 - protein, 162 aa, Deinopis spinosa
GASSSAAAAAATGGGGAGGYGPGIGGGYGPASPTGTGSGLGSGAGAVSPASGTGLGGYGGGSLESSISGLSSQASATRVSSLSSSLTSGGTLNLAALPNQLQQSASEISVSSPGASSCGTMVQLLLELSYSLIYALSSAYGTDASYVNEAMNNIFHILNAFP

SEQ ID NO: 946 - protein, 136 aa, synthetic construct
  REGION 1..136: note = Description of Artificial Sequence: Synthetic polypeptide
GAGGAGGGQGGYGGQGGYGQGTGAGGASSAGLSVTVGNMVSRLSSPEAASRVSSAVSSLVSNGQVNVDALPSIISNLSSSISASATTASDCEVLVQVLLEVVSALVQIVCSANVGYINPEASGSLNAVGSALAAMG

SEQ ID NO: 947 - protein, 239 aa, Euagrus chisoseus
GAYAYAYAIANAFASILANTGLLSVSSAASVASSVASAIATSVSSSSAAAAASASAAAAASAGASAASSASASSSASAAAGAGAGAGAGASGASGAAGGSGGFGLSSGFGAGIGGLGGYPSGALGGLGIPSGLLSSGLLSPAANQRIASLIPLILSAISPNGVNFGVIGSNIASLASQISQSGGGIAASQAFTQALLELVAAFIQVLSSAQIGAVSSSSASAGATANAFAQSLSSAFAG

SEQ ID NO: 948 - protein, 146 aa, Plectreurys tristis
GAGAGAGSGAGAGAGAGAGSGASTSVSTSSSSAAGAGAGAGSGAGAGSGTGAGIALPSIVLSPAASSRISSVSSSVQSAGSGLSFSSLSNTLSQTASAIRSSNPQLSSSDVLIQSLVEIIVGLVQAFTGSSASAQTFVNSLSQVAG

SEQ ID NO: 949 - protein, 184 aa, synthetic construct
  REGION 1..184: note = Description of Artificial Sequence: Synthetic polypeptide
GQGTDSSASSVSTSTSVSSSATGPGSRYPVMDYGADQAEAAASAAAAAAAEAATIAGLDYEGQGQGTDSGASSVSSSTSVSSSATGVTQTTIALPPDVSARISFLTSYLQSAGSGLSLYTLSNLLSQTALAISKSRPELSPNEVLIQSLAEIIVALVQALTKQASSSASVQYFGRFNSLSQVAG

SEQ ID NO: 950 - protein, 132 aa, Plectreurys tristis
GTVAESGSTAASSSYAAAAAASSSAGSTSSPSFLSADSLSSSLASLRICSFSSKLMSSLYSGDGLDIAEFSDAVSSMVSSIKSSNPGVSASQILTELLFEVIVAFVQALTKSKFSTMETAESLIAAFAQAFV

SEQ ID NO: 951 - protein, 193 aa, Plectreurys tristis
GPKEEPLGESSVIATSVSAASSVSSGGAPGVQGGGPVTVSYREGPSQIPSQQTLLQAVPSTQSVGSGVPVGPNQYEMVYAPLQQFGGVSASNLLSPSAHSRIASLMSDVLSLFSPGNSGFNYGGFARALSSVARAVSQSNAKLSTTDVIIQVLMEALVALIELLSGAKIGVVHPVRAQAGASAFAQHFGSAFG

SEQ ID NO: 952 - protein, 236 aa, Agelenopsis aperta
GSLGYQLALQRANSLGIPNAASVAGAVAEAVSAVGVGASSYAYASAISNAVGPLLISQGLLSQSNASALASSFASAFAASAVSSSSSSGSTSQTLGSYLLGTRPALSSRLGLLNLPSSVAVTRPAFVSLISPVLSSETGLSSASASSRVNSLASSVASAIASGQALSADSFAKSLLIQASQIQSSAPSFKADDVVHESLLEGISALIQVINSSYGSPLSLSNAQTVNAGLVNYFLV

SEQ ID NO: 953 - protein, 205 aa, Araneus gemmoides
GNVGYQLGLKVANSLGLGNAQALASQGILNAANAGSLASSFASALSASAGSVGNRSSAGPSAVGLGGVSAVPGFISATPVVGGPVTVNGQVLPAALQTALAPVVTSSGLASSAASARVSSLAQSIASAISSSGGTLSVPIFLNLLSSAGAQATASSSLSSSQVTSQVLLEGIAALLQVINGAQIRSVNLANVPNVQQALVSALSG

SEQ ID NO: 954 - protein, 238 aa, Argiope argentata
GNVAYQLGFNVANTLGLGNAAGLGAALSQAVSSVGVGASSATYANAVSNAVGQFLAGQGILNAANAASLATSFANAVSSSALAAVSRISSPSYGAFASVPKFVPSNLNAGGVSFGEPFAALSQSVPTDLQSALAPIASSSGLGSSAASARVSSLANSVASAISSSGGSLSVPTFLNFLSSVGAQVSSSSSLNSSEVTNEVLLEAIAALLQVLNGAQITSVNLRNVPNAQQALVQALSG

SEQ ID NO: 955 - protein, 170 aa, Argiope aurantia
GSLASSFANALSNSALSVGSRVSSPSYGALSPIAAGPNFISTGLNVGGPFTTLSQSLPTSLQTALAPIVSSSGLGSSAATARVRSLANSIASAISSSGGSLSVPAFLNLLSSVGAQVSSSSSLNSSEVTNEVLLEAIAALLQVINGGSITSVDLRNVPNAQQDLVNALSG

SEQ ID NO: 956 - protein, 241 aa, Argiope bruennichi
GNVGYQLGFNVANTLGIGNAPGLGNALSQAVSSVGVGASSSAYANAVSNAVGQFLAGQGVLNAGNAGSLASSFANALSNSALSVGSRVSSPSYGALSPIAAGPNFISTGLNVGGASVGGPFDSLSQSLPTSLQTALAPIVSSSGLGSSAATARVSSLANSFASAISSSGGSLSVPTFLNLLSSVGAQVSSSSSLSSLEVTNEVLLEAIAALLQVINGGSITSVDLRYVPNAQQDLVNALSG

SEQ ID NO: 957 - protein, 179 aa, Argiope bruennichi
GSLASSFASALSNSALSIGSRVSSPSYGVFSPIAAGPNSISTGLNVGGASIGGPFATLSQSLPTSLQTALAPIVSSSGLGSSAATARVSSLANSIASAISSSGGSLSVPTFLNLLSSIGAQVSSSSSLSSSSEVTTQVLLEAIAALLQVINGAQITSVNFSNVSNVNRALVDSLVGSFA

SEQ ID NO: 958 - protein, 201 aa, Atypoides riversi; identical to SEQ ID NO: 939

SEQ ID NO: 959 - protein, 269 aa, Avicularia juruensis
GSFASASAYAFAFASAFSQVLSNYGLLNINNAYSLASSIANAASTSASSAAAAAVVASSSSAATAAGAASTSVPATSLSSATRVGGSLSSAVSPASARTATGDGTTYLPVQIQPGIGFVPSLSGDIGPNVPGSGGFGSPALPSPVYGPAILGPGLVAPALANLLPPLSVLPSDSANERISSVVSSLLSAISSNGLDASSLGGTIASLVSQISVSNAKLSSSQVFLEALLEVLSGMVQILSYAEVGAVNTDTVISTSSAVAQAISSAVSG

SEQ ID NO: 960 - protein, 220 aa, Deinopis spinosa
GASASAYASAFGSAIGQYLAGIGIISQSNASALASSFASAISSAAGSLSLGGPFGVSGLGIGGLPVGVSPVGVVGPAGVYGPAGLYGPGVVGSLGPVTPLNVIYPSLTTSIAPIIVGPAGLSSAAATSRASSLASSVASAISSAGSAGGVDVGLFASGLSSLVSQIQSSNLGLQPDQVLLEALLEGYSALAQVLISSQISSVSVSSSSALGPALLNYLVG

SEQ ID NO: 961 - protein, 179 aa, Latrodectus hesperus
GILTQENASSLASSVANALSASSLLVPSAISTGVPGLIVGPSIVSSLNAPIAGFAVPGVAQVIVPTAYSTLLAPVLSPAGLASTAATSRINDIAQSLSSTLSSGSQLAPDNVLPGLIQLSSSIQSGNPDLDPAGVLIESLLEYTSALLALLQNAQITTYDAATLPAFNTALVNYLVPLV

SEQ ID NO: 962 - protein, 189 aa, Nephila antipodiana
GVLNAVNASSLGSALANALSDSAANSAVSGNYLGVSQNFGRIAPVTGGTAGISVGVPGYLRTPSSTILAPSNAQIISLGLQTTLAPVLSSSGLSSASASARVSSLAQSLASALSTSRGTLSLSTFLNLLSSISSEIRASTSLDGTQATVEVLLEALAALLQVINGAQITDVNVSSVPSVNAALVSALVA

SEQ ID NO: 963 - protein, 232 aa, Nephila clavata
GIASDTALAGALAQAVAGVGAGASASTYANVIARAAGQFLATQGVLNAGNASALGSALANALSDSAANSAVSGNYVGASQNFGRIAPVTGGTAGISVGVPGFLRTPASTILVPSNAQIISPSLQTTLAPVLSSSGLSSASASARVGSLAQSLASALSTSRGTLSLSTFLNLLSPISSEIRANTSLDGTQATVEALLEALAALLQVINGAQITDVNVSSVPSVNAALASALVA

SEQ ID NO: 964 - protein, 210 aa, Nephila clavipes
GATAASYGNALSTAAGQFFAAQGLLNAGNVSSLASALANALSYSAANSAASGNYIGVSQNFGSIAPVAGTAGISVGVPGLLPTSAGTVLAPANAQIIAPGLQTTLAPVFSSSGLSSASANARVSSLAQSFASALSASRGTLSVSTFLTLLSPISSQIRANTSLDGTQATVQVLLEALAALLQVINAAQITEVNVSNVSSANAALVSALAG

SEQ ID NO: 965 - protein, 194 aa, Nephilengys cruentata
GQFLANQGILNTGNASSLASSFSNALSSSAANSVGSGLLLGPSQYVGSIAPSIGGAAGISIAGPGILSYLPPVSPLNAQIISSGLLASLAPVLSSSGLASSSATSRVGSLAQSLASALQSSGGTLDVSTFLNLLSPISTQIQANTSLNASQAIVQVLLEAVAALLQIINGAQITSVNFGSVSSVNTALATALAG

SEQ ID NO: 966 - protein, 317 aa, Uloborus diversus
GSQSASQAAASSSASASASASAFAQSASLALASSSSFASAISSVSSVSSLGSLGYQVGLQAAGSLGISNSQAFASSISQALTSVGVGASSAAYASAVSGVVAQYLSGTGVLSSANAQALASSFANVFAASAASASAATSASSSASAQSAAAALTQNQSAASAFSQAASQAGSQASSQAGSQVASQSASGLGAFGFGTSASGIITSSPSLANLVSNVAPILLSSNGLSSSSASSRINSIASGLSTALSSSRGVSLENLSSSLSSVFSEIQNNSFGVSAEQALIQALFEVLTGTVQVLNRGQTSFVSVSSPTVISSSFS

SEQ ID NO: 967 - protein, 219 aa, Araneus ventricosus
GAAATAGAGASVAGGYGGGAGAAAGAGAGGYGGGYGAVAGSGAGAAAAASSGAGGAAGYGRGYGAGSGAGAGAGTVAAYGGAGGVATSSSSATASGSRIVTSGGYGYGTSAAAGAGVAAGSYAGAVNRLSSAEAASRVSSNIAAIASGGASALPSVISNIYSGVVASGVSSNEALIQALLELLSALVHVLSSASIGNVSSVGVDSTLNVVQDSVGQYVG

SEQ ID NO: 968 - protein, 163 aa, Argiope argentata
GAYGGGYGGGAAVGRGITYGSASSSATSSSTATSSGSTALTSAGYGSGVGVSAGAGAGAASAGGSYSGSVSRLSSAEAVSRVSSNIGAIASGGASALPGVISNIFSGVSASAGSYEEAVIQSLLEVLSALLHILSNSSIGYVGADGLTDSLAVVQQAMGPVVG

SEQ ID NO: 969 - protein, 132 aa, Deinopis spinosa
GAGSGSQGVGSGSNYGQFSSQDVSGAVLASTSRLASGQATDRVKDVVSTLVSNGINGDALSNAISNVMTQVNAAVPGLSFCERLIQVLLEIVAALVHILSSSNVGSIDYGSTSRTAIGVSNALASAVAGAFS

SEQ ID NO: 970 - protein, 180 aa, Latrodectus hesperus
GSGSASVSTGGYGQSQVARASSSSAVGTSSSVSTSGSSGYSQVSGGYGQSSAVGQASAGYGQMQSGVAVSGGSASATISSAASRLSSPSSSSRISSAASSLATGGVLNSAALPSVVSNIMSQVSASSPGMSSSEVVIQALLELVSSLIHILSSANIGQVDFNSVGNTAAVVGQSLGAALG

SEQ ID NO: 971 - protein, 146 aa, Metepeira grandiosa
GYGSSSSVSSSSSAASSSTSGVVTSGGYGYGAGAAAGAGAGAGASAGSYSGAVNRLSSAEAASRVSSNVAALASGGPAALANVMGNIYSGVASSGVSSGEALVQALLEVISALVHLLSNASIGNVSSAGLGNTMSLVQSTVGAYAG

SEQ ID NO: 972 - protein, 150 aa, Nephila antipodiana
GAGAGATGGYGRGAGAGATNAGGYGGQGGYGAGARAFAGAGVGVGTTVASTTSRLSTAEASSRISTAASTLVSGGYLNTAALPSVIADLFAQVGASSPGVSDSEVLIQVLLEIVSSLIHILSSSSVGQVDFSSVGSSAAAVGQSMQVVMG

SEQ ID NO: 973 - protein, 160 aa, Nephila clavipes
GAGAGRGGYGRGAGAGGYGGQGGYGAGAGAGAAAAAGAGAGGYGDKEIACWSRCRYTVASTTSRLSSAEASSRISSAASTLVSGGYLNTAALPSVISDLFAQVGASSPGVSDSEVLIQVLLEIVSSLIHILSSSSVGQVDFSSVGSSAAAVGQSMQVVMG

SEQ ID NO: 974 - protein, 208 aa, Nephilengys cruentata
GAGAGGTGGYGRGSGAGAAAGAAAGAGAAGGYGGYGAGAGAGAGGARGYGGGAGAGAGAAAGGYGRRAGGSIVGTGISAISSGTGSSYSVSSGGYASAGVGVGSTVASTTSRLSSAQASSRISAAASTLISGGYLNTSALPSVISDLFAQVSASSPGVSDSEVLIQVLLEIVSSLIHILSSSSVGQVDFNSVGSSAAAVGQSMQVVMG

SEQ ID NO: 975 - protein, 217 aa, Parawixia bistriata
GAGAGGGYGGGYSAGGGAGAGSGAAAGAGAGRGGAGGYSAGAGTGAGAAAGAGTAGGYSGGYGAGASSSAGSSFISSSSMSSSQATGYSSSSGYGGGAASAAAGAGAAAGGYGGGYGAGAGAGAAAASGATGRVANSLGAMASGGINALPGVFSNIFSQVSAASGGASGGAVLVQALTEVIALLLHILSSASIGNVSSQGLEGSMAIAQQAIGAYAG

SEQ ID NO: 976 - protein, 188 aa, Uloborus diversus
GAASSQVVSRTTTTTSQSAAGGAASGYSTGVGSGAAAATSGAGYGGQRGYGTGAGAAAGAAASGTGAGYGGQAGYGQGAGASAAAAASAASNRIVSAPAVNRMSAASSTLVSNGAFNVGALGSTISDMAAQIQAGSQGLSSAEATVQALLEVISVLTHMLSSANIGYVDFSRVGDSASAVSQSMAYAG

SEQ ID NO: 977 - protein, 165 aa, Araneus ventricosus
GGPGGPGGPRGAYVPGAGGFSGVSSGAGGVRGGSVMPSGGSGSAGPVTIVENITVGGGPSGGSGGAAGGQTYQTYGGSSRLPSLVNGLMGSMQPTGFNYQNFGNVLSQYATGSGTCNSNDVNLLMDALMAALHCLSYGSGSVPSTPTYSAMSAYNQSIRRMFTYS

SEQ ID NO: 978 - protein, 216 aa, Argiope trifasciata
GGAGGPGAGGVGPGGVGPGGVGPGGIYGPGGAGGLYGPGAGGAFGSGGGAGAPGGPGGPGGPGGPGGLGGGVGGAGTGGGVGPGVGGVGPSGGAGGTGPVSVSSTITVGGGQSSGGVLPSTSYAPTTSGYERLPNLINGIKSSMQGGGFNYQNFGNILSQYATGSGTCNYYDINLLMDALLAALHTLNYQGASYVPSYPSPSEMLSYTENVRRYFS

SEQ ID NO: 979 - protein, 166 aa, Nephila clavipes
GGYGPGGSGSGGVGPGGYGPGGSGGFYGPGGSEGPYGPSGTYGSGGGYGPGGAGGPYGPGSPGGAYGPGSPGGAYYPSSRVPDMVNGIMSAMQGSGFNYQMFGNMLSQYSSGSGTCNPNNVNVLMDALLAALHCLSNHGSSSFAPSPTPAAMSAYSNSVGRMFAYS

SEQ ID NO: 980 - protein, 161 aa, Nephilengys cruentata
GAGGSGPGGAGPGGAGPGGAGPGGAGPGGVGPGGAGGPYGSGGFGFGGAGGSGGPYVPGGAYGAGSGTPSYSGSRVPDLVNGIMRSMQGSGFNYQMFGNMLSKYASGSGACNSNDVNVLMDALLAALHCLSSHGSPSFGSSPTPSAMNAYSNSVRRMFQFS

SEQ ID NO: 981 - protein, 208 aa, Nephila madagascariensis
GGSGPGGAGGSGPGGAGPGGVGPGGSGPGGLGSGGSGPGGVGPGGSGPGGVGPGGYGPGGSGGLYGPGSYGPGGSGVPYGSSGTYGSGGGYGPGGAGGAYGPGSPGGAYGPGSGGSYYPSSRVPDMVNGIMSAMQGSGFNYQMFGNMLSQYSSGSGSCNPNNVNVLMDALLAALHCLSNHGSSSFAPSPTPAAMSAYSNSVGRMFAYS

SEQ ID NO: 982 - protein, 172 aa, Latrodectus hesperus
GINVDSDIGSVSSLILSGSTLQMTASGKGSYPGGESSQFSGLDSNIGLVGTQDVAIGVSQPVDISLNNILDSPQGLKSPQASSRINRLSSSVVNALGPNGLDINNFSDGLRTTLSQLSSSGLSKKEAAIETLMEAMVALLQVLNSAQVNQVDTSSTVVTSSSLAKALSSLFS

SEQ ID NO: 983 - protein, 170 aa, Araneus ventricosus
GGGVGSFGGQTSFGQTSGLTSSAASQSDFTQASGFVSSATSQGAFGQTSGIASFGAGPSTGLSVRSTLNSPNGLRSGSAAARISQLTSSVRNAIGPNGVDANALARSLQASFSSLRSSGMSSSDAKIEVLFETIVGLLQLLSNTQIRGVNMATASSVANSAARSFELVLA

SEQ ID NO: 984 - protein, 159 aa, Argiope trifasciata
GAGYTGPSGPSTGPSGYPGPLSGGASFGSGQSSFGQTSAFSASGAGQSAGVSVISSLNSPVGLRSASAASRLSQLTSSITNAVGANGVDANSLARSLQSSFSALRSSGMSSSDAKIEVLLETIVGLLQLLSNTQVRGVNPATASSVANSAARSFELVLA

SEQ ID NO: 985 - protein, 159 aa, Parawixia bistriata
GFARAYTGPQISQPAPLGVGPQVSQPRPLGVAPQTSGARPFGGVTGPSAGISLGSALNSPIGLRSGLAAARISQLTSSLGNAITPYGVDANALASSLQASFSTLQSSGMSASDAKIEVLLETIVGLLQLLSNTQIRGVNMATASSVASSAAKSFELVLS

SEQ ID NO: 986 - protein, 213 aa, Uloborus diversus
GASAADIATAIAASVATSLLSSGYLSDSNASQLGNSLASSISSVALNVAADLGVSLSASANLSSSLGASAGISSSFDASSASSTSLSSSSSLSSQQQVTSSAAVSLNSVITSPVGLASPQASSRVRYLSQLALNAISPQGFNVEAFVSQLGTIMAQARAMGMSASDATIETLLEGLLSLVQALGSCQAGSYNPARSAEASNIFLSAIQSTLSS

SEQ ID NO: 987 - protein, 155 aa, Agelenopsis aperta
GPGYGYAAYYASSYGYGPGVGSGAGAGSGSGAGSAAGAGSGSGAGAGRDVTNTVVNSVSRLSSPSSSSRVSSAVSGLLPNGNFNLGNLPGIVSNLSSSIASSGLSGCENLVQVLIEVVSALVHILGSANIGNINMNAASSTAAAVGQAIVNGLYS

SEQ ID NO: 988 - protein, 236 aa, Aphonopelma seemanni
GKAISSSAASAAASASAASAAATASAAASSSASTTRTTGATSAAGDFSVVADASADSSVLADEAARGAVGAVSGGGAASRSVGLIGSGFPGYVSSAPFSLISSVAGGGGSSPVPVSPLAGGLLPPSSYLSSPAAAERISSVIPLLLSGISPNRLDASLLGNTLGSLVAQVSLNRAGLSFSQIIVEALLELLCGVIQILSFAEITVVNTGTLSSTSFALAQAMSAAVRNTYRFHSTV

SEQ ID NO: 989 - protein, 162 aa, synthetic construct
  REGION 1..162: note = Description of Artificial Sequence: Synthetic polypeptide
GGYGPGSGQQGPGQQGPGQQGPGQQGPYGAGASAAAAAAGGYGPGSGQQGPGVRVAAPVASAAASRLSSSAASSRVSSAVSSLVSSGPTTPAALSNTISSAVSQISASNPGLSGCDVLVQALLEVVSALVHILGSSSVGQINYGASAQYAQMVGQSVTQALV

SEQ ID NO: 990 - protein, 141 aa, Araneus ventricosus
GGAGGAGQGGLGAGGAGQGGYGGGAYGGQGAASSAAAASAAASRLSSPSAASRVSSAVSSLVSSGGPSSPAALSSTISNVVSQISASNPGLSGCDVLVQALLEIVSALVHILGSANIGQVNSSAAGQSASLVGQSVYQALS

SEQ ID NO: 991 - protein, 153 aa, Argiope amoena
GGYGPGAGQQGPGGAGQQGPGGQGPYGPSVAAAASAAGGYGPGAGQQGPVASAAVSRLSSPQASSRVSSAVSSLVSSGPTNPAALSNAMSSVVSQVSASNPGLSGCDVLVQALLEIVSALVHILGSSSIGQINYAASSQYAQMVGQSVAQALA

SEQ ID NO: 992 - protein, 166 aa, Argiope amoena
GGYGPGAGQQGPGGAGQQGPGSQGPGGAGQQGPGGQGPYGPSAAAAASAAGGYGPGAGQQGPVASAAASRLSSPQASSRISSAVSSLVSSGPTNPAALSNAISSIVSQVSASNPGLSGCDALVQALLEIVSALVHILGSSSIGQINYAASSQYAQMVGQSVTQALV

SEQ ID NO: 993 - protein, 149 aa, Argiope amoena
GGYGPRYGQQGPGAGPYGPGAGATAAAAGGYGPGAGQQGPRSQAPVASAAAARLSSPQAGSRVSSAVSTLVSSGPTNPASLSNAIGSVVSQVSASNPGLPSCDVLVQALLEIVSALVHILGSSSIGQINYSASSQYARLVGQSIAQALG

SEQ ID NO: 994 - protein, 140 aa, Argiope amoena
GGQGGYGGLGSQGAGQGGYGGGAYGGQQGAAASAAAASAAASRLSSPGAASRVSSAVTSLVSSGGPTNSAALSNTISDVVSQISASNPGLSGCDVLVQALLEIVSALVHILGSANIGQVNSSSAGQSASLVGQSVYQALS

SEQ ID NO: 995 - protein, 121 aa, synthetic construct
  REGION 1..121: note = Description of Artificial Sequence: Synthetic polypeptide
GGYGPGAGQQGPGSQAPVASAAASRLSSPQASSRVSSAVSTLVSSGPTNPAALSNAISSVVSQVSASNPGLSGCDVLVQALLELVSALVHILGSSSIGQINYAASSQYAQMVGNSVAQALG

SEQ ID NO: 996 - protein, 163 aa, Argiope bruennichi
GGYGPGAGQQGPGSQGPGSGGQQGPGGQGPYGPSAAAAAAAAGGYGPGAGQQGPSSQAPVASAAASRLSSPQASARVSSAVSTLVSSGPTSPAALSNAISSVVSQVSASNPGLSGCDVLVQALLEIVSALVHILGSSSIGQINYAASSQYAQMVGNSVAQALG

SEQ ID NO: 997 - protein, 171 aa, Argiope bruennichi
GGQGGRGGFGGLSSQGAGGAGQGGSGAAAAAAAAGGDGGSGLGDYGAGRGYGAGLGGAGGAGVASAAASAAASRLSSPSAASRVSSAVTSLISGGGPTNPAALSNTFSNVVYQISVSSPGLSGCDVLIQALLELVSALVHILGSAIIGQVNSSAAGESASLVGQSVYQAFS

SEQ ID NO: 998 - protein, 177 aa, Argiope trifasciata
GGQGGQGGYGGLGSQGAGQGGYGQGGAAAAAASAGGQGGQGGYGGLGSQGAGQGGYGGGAFSGQQGGAASVATASAAASRLSSPGAASRVSSAVTSLVSSGGPTNSAALSNTISNVVSQISSSNPGLSGCDVLVQALLEIVSALVHILGSANIGQVNSSGVGRSASIVGQSINQAFS

SEQ ID NO: 999 - protein, 122 aa, Argiope trifasciata
GPGYGPGAGQQGPGSQAPVASAAASRLSSPQASSRVSSAVSTLVSSGPTNPASLSNAISSVVSQVSSSNPGLSGCDVLVQALLEIVSALVHILGSSSIGQINYAASSQYAQLVGQSLTQALG

SEQ ID NO: 1000 - protein, 220 aa, Avicularia juruensis
GAASSAAVGAAATSGAATSGAATSSSSATGVGGSVSSGASPASAGTATGGGISFLPVQTQRGFGLVPSPSGNIGANFPGSGEFGPSPLTSPVYGPGILGPGLVVPSLQGLLPPLFVLPSNSATERISSMVSSLLSAVSSNGLDASSFGDTIASLVSQISVNNSDLSSSQVLLEALLEILSGMVQILSYAEVGTVNTKTVSSTSAAVAQAISSAFSGNQNS

SEQ ID NO: 1001 - protein, 183 aa, Avicularia juruensis
GSGAARAAQTASAASAASASSSLAQLGSALAQSSSFAAAFDQGNSAASAAAIAYVLAQSAANKVGLSSYSAAISNAASAAVESVGGYASASAHAFAFASAVSQVLSNYGLINLSNALSLASSIANAVSASASSAAAVSSAAAATGATSSAAVGAAATCGAATSASSATGVGETVACATSPAST

SEQ ID NO: 1002 - protein, 185 aa, Avicularia juruensis
GTAAGGGISSLPVQTQPGFGFLLSPSGNIGPSVSGSGGFGPSPLPSPASDGFSPSPLPSQVYGPGILGPGLVAPSLEGLLPPLSILPSDSANERISSVVSSLLAAVSSNGLDASSLGDNLASLVSQISANNADLSSSQVMVEALLEVLSGIVQILSYAEVGAVNTETVSSTSSAVAQAISSAVLG

SEQ ID NO: 1003 - protein, 176 aa, Deinopis spinosa
GSGGYGSQGAGQGGQQGRGQGGQGQYGPGEGEQVPGQGGQGPAASAATASAGGPGEYGGQQGPGQGGQQQPGQGGQGPSAAAAASAAVGSGGYGSQGQQGQGGQGPTASAAAAAASVAGPGGYGASGQQGPRQGSQQGRFGPAAGQQGPGQTGQMGPGQQGPSGPSSAAAASAAAA

SEQ ID NO: 1004 - protein, 143 aa, Deinopis spinosa
GGPGGYGGPGQQGGGQQAPVQPRPYVPGMSGQIVTSDVSSTVSSAVSRMSTPGSGSRISNAVSNILSSGVSSSSGLSNVISNLSSSISTSNPGLSGCDVLVQVLLEVISALVHILSSASLGQVGSSPQNAQMVAANAVANAFS

SEQ ID NO: 1005 - protein, 142 aa, Deinopis spinosa
GPGGYGGPGQQGGGQQAPVQPRPYVPVTSGQIVTSDVSSTVSSAVSRMSTPGSGSRISNAVSNILSSGVSSSSGLSNAISNISSSISASNPGLSGCDVLVQVLLEVISALVHILGSASVGQVGSSPQNAQMVAANAVANAFS

SEQ ID NO: 1006 - protein, 198 aa, Diguetia canities
GAGGDSGLFLSSGDFGRGGAGAGAGAAAASAAAASAASAGAGRGTGFGERILIGGSRGFGGARVDAPAASTASASAAAASSGAGGGSRFGGLGVGVFGAGSGELSVASRISTMASSMSSLLSSNFSPVIFSSLANVIANGASAIAVAHPELSGAGVLTEALLEALVAFCYAHAGSIASASDVNLAVTTLASTMQGSLP

SEQ ID NO: 1007 - protein, 137 aa, Diguetia canities
GSGQGASFGISQQFGAPSGAASSAAAAAAAAAGASSPGALLVSADAPSRIASVSSSLNSVVSSGASASSFASIATQIADVAGQVSSVHPELSSLEVLVEALIEIIVALVHAQSGGASSASASASASALASQLGQLFG

SEQ ID NO: 1008 - protein, 168 aa, Dolomedes tenebrosus
GGAGAGQGGYGGQGGLGGYGQGAGAGASAAASASGAGSGQGGYGGQGGYGQGTGAGAASSAGVAVTVGNTVSRLSSPQAASRVSSAVSSLVSNGQVNVAALPSIISSLSSSISASSTAASDCEVLVQVLLEIVSALVQIVSSANVGYINPEASGSLNAVGSALAAAMG

SEQ ID NO: 1009 - protein, 165 aa, Euprosthenops australis
GQGGQGGYGRQSQGAGSAAAAAAAAAAAAAAGSGQGGYGGQGQGGYGQSSASASAAASAASTVANSVSRLSSPSAVSRVSSAVSSLVSNGQVNMAALPNIISNISSSVSASAPGASGCEVIVQALLEVITALVQIVSSSSVGYINPSAVNQITNVVANAMAQVMG

SEQ ID NO: 1010 - protein, 168 aa, Euprosthenops australis
GGQGQGGFGQGTVGNAAAAAAAAAAAAAAQQGGQGGFGGQGQRGFGQRAASAVASAASAADVGNTVANTVSRLSSPSAASRVSSAVANLVSNGQLNMAALPYIISNISSSVSASVPGASGCEVIVQALLEVVAALCQIVSSSNVGYINPSAVNDITNVVANAMAQVMG

SEQ ID NO: 1011 - protein, 168 aa, Euprosthenops australis
GESGQGGYGGRGQGGYGQGAGAAAAAAVAAAAAAAGQGGFGGLGGYGQGAGSATAAASSADVSTTVANSVSRLSSASAASRVYSVVSNLVSNGQVNIAALPNIISNVSSSVSASAPGASGCEVIVQVLLEIVAALTSIVSSASVGYINQYAVNDITNLVANAMAGVIG

SEQ ID NO: 1012 - protein, 114 aa, synthetic construct
  REGION 1..114: note = Description of Artificial Sequence: Synthetic polypeptide
GGYGPGSGGSPASGAASRLSSPQAGARVSSAVSALVASGPTSPAAVSSAISNVASQISASNPGLSGCDVLVQALLEIVSALVSILSSASIGQINYGASGQYAAMIGQSVAQALA

SEQ ID NO: 1013 - protein, 177 aa, Hypochilus thorelli
GASGAGQGQGYGQQAQVYNQGGSGSVATTAAAASGAVGVSQNYAQAPVYYGGSSSSYSSSITSYSSSVLPIAILQSPAGLTSSAAGSRMSSVATSITSLIPSNGSPFNYSAFSNTLASLINNIGNSNPGLSRNDVTIEALLEVITALLQVISNGELSAAASSYAAASLLQSIQQGYS

SEQ ID NO: 1014 - protein, 201 aa, Megahexura fulva
GAYGFTQAAASAVASVLLQAGVLNYGNATALASAYASAYASSVASAAASASAGASASSGASAYASAVAAAAAAASVSTSAGASASAGASGLSFSQAQASALSSSAAAYRISSLITSFVSGLSAGGGSVNYSVIANALASVASQISASNAGLSVSQVAVQALLEFSTALIQILASSQIGYVNTASAGSTASAFSQALAQTFA

SEQ ID NO: 1015 - protein, 166 aa, Nephila antipodiana
GGAGQGGYGGLGGQGAGQGGLGGQRAGAAAAAAGGAGQGGYGGLGSQGAGRGGYGGVGSGASAASAAASRLSSPEASSRVSSAVSNLVSSGPTNSAALSSTISNVVSQISASNPGLSGCDVLVQALLEVVSALIQILGSSSIGQVNYGTAGQAAQIVGQSVYQALG

SEQ ID NO: 1016 - protein, 151 aa, Nephila clavipes
GGAGQGGYGGLGGQGVGRGGLGGQGAGAAAAGGAGQGGYGGVGSGASAASAAASRLSSPQASSRLSSAVSNLVATGPTNSAALSSTISNVVSQIGASNPGLSGCDVLIQALLEVVSALIQILGSSSIGQVNYGSAGQATQIVGQSVYQALG

SEQ ID NO: 1017 - protein, 164 aa, Nephila clavipes
GPGGYGPAQQGPSGPGIAASAASAGPGGYGPAQQGPAGYGPGSAVAASAGAGSAGYGPGSQASAAASRLASPDSGARVASAVSNLVSSGPTSSAALSSVISNAVSQIGASNPGLSGCDVLIQALLEIVSACVTILSSSSIGQVNYGAASQFAQVVGQSVLSAFS

SEQ ID NO: 1018 - protein, 159 aa, synthetic construct
  REGION 1..159: note = Description of Artificial Sequence: Synthetic polypeptide
GPGGYGPVQQGPSGPGSAAGPGGYGPAQQGPARYGPGSAAAAAAAAGSAGYGPGPQASAAASRLASPDSGARVASAVSNLVSSGPTSSAALSSVISNAVSQIGASNPGLSGCDVLIQALLEIVSACVTILSSSSIGQVNYGAASQFAQVVGQSVLSAFS

SEQ ID NO: 1019 - protein, 153 aa, synthetic construct
  REGION 1..153: note = Description of Artificial Sequence: Synthetic polypeptide
GGAGQGGYGGLGSQGAGRGGYGGQGAGAAAAATGGAGQGGYGGVGSGASAASAAASRLSSPQASSRVSSAVSNLVASGPTNSAALSSTISNAVSQIGASNPGLSGCDVLIQALLEVVSALIHILGSSSIGQVNYGSAGQATQIVGQSVYQALG

SEQ ID NO: 1020 - protein, 164 aa, synthetic construct
  REGION 1..164: note = Description of Artificial Sequence: Synthetic polypeptide
GGAGQGGYGGLGGQGSGAAAAGTGQGGYGSLGGQGAGAAGAAAAAVGGAGQGGYGGVGSAAASAAASRLSSPEASSRVSSAVSNLVSSGPTNSAALSNTISNVVSQISSSNPGLSGCDVLVQALLEVVSALIHILGSSSIGQVNYGSAGQATQIVGQSVYQALG

SEQ ID NO: 1021 - protein, 153 aa, synthetic construct
  REGION 1..153: note = Description of Artificial Sequence: Synthetic polypeptide
GGAGQGGYGGLGSQGAGRGGYGGQGAGAAVAAIGGVGQGGYGGVGSGASAASAAASRLSSPEASSRVSSAVSNLVSSGPTNSAALSSTISNVVSQIGASNPGLSGCDVLIQALLEVVSALVHILGSSSIGQVNYGSAGQATQIVGQSVYQALG

SEQ ID NO: 1022 - protein, 142 aa, Nephilengys cruentata
GGSGRGGYGSQGAGQGAAAAAAGGAGQGGYGGAGSGAAAASAAASRLSSPEASSRVSSAVSNLVSSGPTNSAALSNTISSVVSQISASNPGLSGCDVLVQALLEVVSALIHILGSSSIGPVNYGSASQSTQIVGQSVYQALG

SEQ ID NO: 1023 - protein, 166 aa, Parawixia bistriata
GGYGPGSGQQGPGGAGQQGPGGQGPYGPGSSSAAAVGGYGPSSGLQGPAGQGPYGPGAAASAAAAAGASRLSSPQASSRVSSAVSSLVSSGPTNSAALTNTISSVVSQISASNPGLSGCDVLIQALLEIVSALVHILGYSSIGQINYDAAAQYASLVGQSVAQALA

SEQ ID NO: 1024 - protein, 179 aa, Parawixia bistriata
GVLGGQGGLGGLGSQGAGQGGYGQGGAGQGGAAAAAAAAAAGGLGGQGGRGGLGSQGAGQGGYGQGGAGASSAAAASAAASRLSSASAASRVSSAVSSLVSSGGPTNSAALSSTISNVVSQVSASNPGLSGCDVLVQALLEIVSALVHILGSSSIGQVNYNAAGQSASVVGQSFYQALA

SEQ ID NO: 1025 - protein, 230 aa, Peucetia viridans
GTGQGGVGGYGQGAGSSAGAGTGGVGQGGYGSYGSSYQSTSGISIALSTQSLGGQGQYGQGLGAGASAGAGAAVGTGLGQGGLGGYGQGSGSASAAASGSGSAIGGFGGYGQGAGLGAGTAADVGATVSNTVSRLSSPAATSRVSSAVSSLVANGAPNLSSLPNVISSLSNSVSASTPGASGCEILVQVLMEVVTALVQILSSANVSSVNAGDPSQAAMTVGQSVAAALG

SEQ ID NO: 1026 - protein, 208 aa, Poecilotheria regalis
GASSNASSAAAAASTVLAGVAPAGSSASSSAASASTGAGAAISSVGPAVGFGAGPAPAGGLVSGLPGYSPLNQGFTPYPGVPLPTGSGVSAPVPVSPLPLGLLPSSLDLSSPSATGRMSSLVRSLLSAVSSGGLNSSLLGSTLTSLVSQISSSRSDLSASQVLVEAVLEILSAVIQILSSATIGVVSTDSVGATSSAVAQAVSSAFAG

SEQ ID NO: 1027 - protein, 142 aa, synthetic construct
  REGION 1..142: note = Description of Artificial Sequence: Synthetic polypeptide
GGLGGGQGGYGSGLGGVGQGGQGALGGSRNSATNAISNSASNAVSLLSSPASNARISSAVSALASGAASGPGYLSSVISNVVSQVSSNSGGLVGCDTLVQALLEAAAALVHVLASSSGGQVNLNTAGYTSQMVSQTIAQVFA

SEQ ID NO: 1028 - protein, 138 aa, synthetic construct
  REGION 1..138: note = Description of Artificial Sequence: Synthetic polypeptide
GGLGGGQGGQQGAGRGGLQGAGQGGQGALGGSRNSAANAVSRLSSPASNARISSAVSALASGGASSPGYLSSIISNVVSQVSSNNDGLSGCDTVVQALLEVAAALVHVLASSNIGQVNLNTAGYTSQMVSQTIAQVFA

SEQ ID NO: 1029 - protein, 137 aa, Uloborus diversus
GGSGGQGGQGGYGSGGQGQGQGGYGSGAASAAAAASSSVSRLQSPASSSRVSSAVSTLASAGAANSGALSSVISNLSSSVASAHPDLSGCELLVQILLEVISALVALLGSSTVGPVDIGQSSQYSGLVANAIGNALA

SEQ ID NO: 1030 - protein, 133 aa, Araneus diadematus
GPGQQGPYGPSQQGPGSYGPSGQVSSVSASVSSAASRLSSPAASSRVSSTVSSLASSGPSDASVVSSALSNLVSQVSASQPGLSGCDVIVQALLELVSALVHILGSSSLGQVDYNGASYSAQRLSQALGNTLG

SEQ ID NO: 1031 - protein, 136 aa, Araneus diadematus
GSGAGAGSAAAAGAGVGAAGGYGGGAGAGAVAGASAGSYGGAVNRLSSAGAASRVSSNVAAIASAGAAALPNVISNIYSGVLSSGVSSSEALIQALLEVISALIHVLGSASIGNVSSVGVNSALNAVQNAVGAYAG

SEQ ID NO: 1032 - protein, 125 aa, Araneus diadematus
GQGGYGGSAYGGQGATASAAAASAAASRLSSPSAASRVSSAVSSLVSNGGPTSPAALSSSISNVVSQISASNPGLSGCDILVQALLEIISALVHILGSSSIGQVNSSSAGQSASIVGQSVYRALS

SEQ ID NO: 1033 - protein, 167 aa, Araneus diadematus
GGPGGPGGRGGPGRSGGRGGLEGAGASGGFGPVAGGASPGAGGSGSTTVTEVVSVTVSGGQPSSGVLPGGSYTPAAGGSARLPSLINGIMSSMQGGGFNYQNFGNVLSQFSTGTGTCNSNDLNLLMDALLAALHTLSYQGMSTVPSYPSPSAMSSYSQSVRRCFGYS

SEQ ID NO: 1034 - protein, 121 aa, Araneus diadematus
GVGPGGAYGPGAGGLSGVSSGAGGIRGGQTYGGSSRLPSLVNGLMGSMQPSGFNYQNFGNVMSQYATGSGTCNSNDVNLLMDALMAALHCLSYGSGSVPPTPTYSAMSAYNQSIRRMFAYS

SEQ ID NO: 1035 - protein, 121 aa, Araneus diadematus
GQQGYSSSSSAGASSAATASAAASRLSSTDSSSRVSSAVSSLVSNGPSNPVALANAVSRVMSQVNASSSGLSECDVLVQALLEILSALVHILGSATVGEVNYDATSQTAQMVSQTIAQVFA

SEQ ID NO: 1036 - protein, 132 aa, Araneus diadematus
GPGPQGPSGPGPQGPSPQGPSSGYDQSVVISSASSRLSSPSATSRISSAISTLKTSGPRNPVGLSTALGNILSQIQLTNPGLSGCESLVQALLEIVSALIQILSVSSVGPVDFSATGQSAAIVGQALMQSLG

SEQ ID NO: 1037 - protein, 154 aa, Araneus diadematus
GGAAGSGVGYGGASGVVTSSSSASAGGSGIITYGGYGYGAGAAAGAGAGAVAGSYGGAVNRLSSAEATNRVSSNVGAIVSGGVSALPSVISNIFSGVNASAAGASYGEALIQSLMEVVSVLLHILSNSSIGYVSSEGLGNSLSVVQQAIGPLAG

SEQ ID NO: 1038 - protein, 140 aa, Araneus diadematus
GSSFANAASAAPAVSVDGPVVVSGQVLPASLLTALAPVVSSSGLASSTASARVSSLAQSIASAISSSGGTLSVPTFLNLLSSAGAQVTTSSTLNSSQVTSQVLLEGIAALLQVINGAQIRSVNLANAPNVQQALVSALAG

SEQ ID NO: 1039 - protein, 197 aa, Agelenopsis aperta
GQGTSFASSATAGIRNIFGNPNTANNFVDCLKGGIQASPAFPRQEQADIQSIASSILSAGNTATKSKAIEQALSTALASSLAEIVITESGGQDYSKQITDLNGILSNCFIQTTGVENKRFVNSIQNLIRLLAESAVSETTNSIQIGPYASTSSNSFSDSSANDASGAYAFSQSSASTLASSSAFSSAFSSASSASAV

SEQ ID NO: 1040 - protein, 197 aa, Argiope argentata
GQSVAVTAVPSVFSSPNLASGFLQCLTFGIGNSPAFPTQEQQDLDAIAQVILNAVSTNTGATASARAQALSTALASSLTDLLIAESAESNYNNQLSELTGILSNCFIQTTGSDNPAFVSRIQSLISVLSQNTDVNIISTAGLPTAISGAGGFGFAKTASSSASQASASSFAQASSASLAASSSFSSAFSSANTLSAL

SEQ ID NO: 1041 - protein, 203 aa, Argiope bruennichi
GQSVAVTAVPSVFSSPNLASGFLQCLTFGIGNSPAFPTQEQQDLDAIAQVILNAVSSNTGATASARAQALSTALASSLTDLLIAESAESNYSNQLSELTGILSDCFIQTTGSDNPAFVSRIQSLISVLSQNADTNIISSAGIPSVSGRRGAGGLGFDNTARQSASSAASQASASSFAQASSASLAASSAFSSAFSSANSLSAL

SEQ ID NO: 1042 - protein, 140 aa, Argiope bruennichi
GQQSKFGQRFPSVSHIWNRKFSRISYSRTTRLGCHCPGDTQCRFKQHWRHSIGQSSGFKYSACIFSSANSLSALGNVAYQLGFNVANTLGIGNAPGLGAALSQAVSSVGVGASSSTYANVVSNAVGQFLAGQGVLNAANA

SEQ ID NO: 1043 - protein, 252 aa, Latrodectus hesperus
GLPANSLSGVSASVNIFNSPNAATSFLNCLRSNIESSPAFPFQEQADLDSIAEVILSDVSSVNTASSATSLALSTALASSLAELLVTESAEEDIDNQVVALSTILSQCFVETTGSPNPAFVASVKSLLGVLSQSASNYEFVETADESIAANVPGITTTGNFTPLNAIEQNFVSSLASSPSLARTFYSVSNADQAANIAYNLGLNIAPSLGIPNSEALASSLRQAVASAGEGVNSSTYANLVSNTLGQFLSSQ

SEQ ID NO: 1044 - protein, 240 aa, Nephila clavata
GQAISVATPVPSVFSSPSLASGFLGCLTTGIGLSPAFPFQEQQDLDDLAKVILSAVTSNTDTSKSARAQALSTALASSLADLLISESSGSSYQTQISALTNILSDCFVTTTGSNNPAFVSRVQTLIGVLSQSSSNAISGATGGSAFAQSQAFQQSASQNTGLSASRAGSTSSSTTTTTSAAASQAASQSASSSSSYAFAQAASSSLATSSAISRAFASVSSASAASSLAYTIGLSAARSL

SEQ ID NO: 1045 - protein, 174 aa, Araneus ventricosus
GQPIWTNPNAAMTMTNNLVQCASRSGVLTADQMDDMGMMADSVNSQMQKMGPNPPQHRLRAMNTAMAAEVAEVVATSPPQSYSAVLNTIGACLRESMMQATGSVDNAFTNEVMQLVKMLSADSANEVSTASASGASYATSTSSAVSSSQATGYSTAAGYGNAAGAGAGAAAAVS

SEQ ID NO: 1046 - protein, 164 aa, Metepeira grandiosa
GHIWGTPGAGKSVTGSIVQCAGQSGVFSGDQMQDLGDMADAVNRQLDRLGPNAPDHRLKGVTTMMAAGIADAAVNSPGQSLDVMINTISGCMTQAMSQAVGYVDQTLIREVAEMVNMLANENANAVSTSGGVSGGSYEVSQSSSASSATAQAGYSSSVQFGTSS

SEQ ID NO: 1047 - protein, 231 aa, Uloborus diversus
GALGQGASVWSSPQMAENFMNGFSMALSQAGAFSGQEMKDFDDVRDIMNSAMDKMIRSGKSGRGAMRAMNAAFGSAIAEIVAANGGKEYQIGAVLDAVTNTLLQLTGNADNGFLNEISRLITLFSSVEANDVSASAGADASGSSGPVGGYSSGAGAAVGQGTAQAVGYGGGAQGVASSAAAGATNYAQGVSTGSTQNVATSTVTTTTNVAGSTATGYNTGYGIGAAAGAAA

SEQ ID NO: 1048 - protein, 265 aa, Nephila clavipes
GRGIIANSPFSNPNTAEAFARSFVSNIVSSGEFGAQGAEDFDDIIQSLIQAQSMGKGRHDTKAKAKAMQVALASSIAELVIAESSGGDVQRKTNVISNALRNALMSTTGSPNEEFVHEVQDLIQMLSQEQINEVDTSGPGQYYRSSSSGGGGGGQGGPVVTETLTVTVGGSGGGQPSGAGPSGTGGYAPTGYAPSGSGAGGVRPSASGPSGSGPSGGSRPSSSGPSGTRPSPNGASGSSPGGIAPGGSNSGGAGVSGATGGPASS

SEQ ID NO: 1049 - protein, 239 aa, Nephila madagascariensis
GRGIIVNSPFSNPNTAEAFARSFVSNVVSSGEFGAQGAEDFDDIIQSLIQAQSMGKGRHDTKAKAKAMQVALASSIAELVIAESSGGDVQRKTNVISNALRNALMSTTGSPNEEFVHEVQDLIQMLSQEQINEVDTSGPGQYYRSSSSGGGGGGGGGPVITETLTVTVGGSGAGQPSGAGPSGTGGYAPTGYAPSGSGPGGVRPSASGPSGSGPSGSRPSSSGSSGTRPSANAAGGSSP

SEQ ID NO: 1050 - protein, 241 aa, Latrodectus hesperus
GVQVEGRKGHHHSSGSSKSPWANPAKANAFMKCLIQKISTSPVFPQQEKEDMEEIVETMMSAFSSMSTSGGSNAAKLQAMNMAFASSMAELVIAEDADNPDSISIKTEALAKSLQQCFKSTLGSVNRHFIAEIKDLIGMFAREAAAMEEAGDEEEETYPSAFEIPDQSISVPSADFISGMDTFIGFGGTSASGDVSAKLSKSLLSSLASSGVFRAAFNSRVSTPVAVQLTDALVQKIASNL

SEQ ID NO: 1051 - protein, 267 aa, Latrodectus hesperus
GLDYATASKLRKASQAVSKVRMGSDTNAYALAISSALAEVLSSSGKVADANINQIAPQLASGIVLGVSTTAPQFGVDLSSINVNLDISNVARNMQASIQGGPAPITAEGPDFGAGYPGGAPTDLSGLDMGAPSDGSRGGDATAKLLQALVPALLKSDVFRAIYKRGTRKQVVQYVTNSALQQAASSLGLDASTISQLQTKATQALSSVSADSDSTAYAKAFGLAIAQVLGTSGQVNDANVNQIGAKLATGILRGSSAVAPRLGIDLS

SEQ ID NO: 1052 - protein, 145 aa, Agelenopsis aperta
GQSNPWTDTATAESFISSVMSSVANQGCLSYDQIDDMQAVGDTMLATMDNLVRSGKSSSHMLKAMNMAMGTSIAEIVADGGGNLGSKVSCISNALSSAFLQTTGSVNTQFVNEIVSLISMFAQADTNEVGVGSGSGAGAGSGAGA

SEQ ID NO: 1053 - protein, 169 aa, Argiope bruennichi
GVGQAATPWENSQLAEDFINSFLRFIAQSGAFSPNQLDDMSSIGDTLKTAIEKMAQSRKSSKSKLQALNMAFASSMAEIAVAEQGGLSLEAKTNAIANALASAFLETTGFVNQQFVSEIKSLIYMIAQASSNEISGSAAAAGGGSGGGGGSGQGGYGQGASASASAAAA

SEQ ID NO: 1054 - protein, 252 aa, Argiope trifasciata
GVFSAGQGATPWENSQLAESFISRFLRFIGQSGAFSPNQLDDMSSIGDTLKTAIEKMAQSRKSSKSKLQALNMAFASSMAEIAVAEQGGLSLEAKTNAIASALSAAFLETTGYVNQQFVNEIKTLIFMIAQASSNEISGSAAAAGGSSGGGGGSGQGGYGQGAYASASAAAAYGSAPQGTGGPASQGPSQQGPVSQPSYGPSATVAVTAVGGRPQGPSAPRQQGPSQQGPGQQGPGGRGPYGPSAAAAAAAA

SEQ ID NO: 1055 - protein, 212 aa, Bothriocyrtum californicum
GRTKVTNVPWTDEAKGKKFLSTFLDYALDHGLFPQQERDDLEAISQNLIPVFRKTMDSGGNAAAKMKALNMAFASSIAEIAVQEGGAGSIEEKTQAVSEALAHAFLQTTGSVNIQFIKEIRALITLFAKEGQDNETENEIPTQQAYPELQPRGGGLQGQPGQYESVRANYAGSGGASRGQAAKEDSGAAAASSSSTSTSTTTTSSAAAAAAA

SEQ ID NO: 1056 - protein, 291 aa, Deinopis spinosa
GASSYASANTTPWRDAATAQAFIGNFMQAICYDPVINPQQCDDMNSMASTILAGVQNMARDGKISKAKLQAMNMGFASAIAEIALVEGGAPAENAVVNAMQSAIWQSTGSPNRSFINEMKALMKMLAQQSNFVAAAASTAASASSQATAPAYGGGSGSAVASASSQGTAPAYGGGSGSAGGQGQGQGSSGQQGQTQGTYQYTVSMSTATSTYGQQSAGQQGGQGGALQGGRQQGGQGPNGPGASAAASASAGAPAAAAPGGYGGPGQQGPGQGQKGPATSAAAAAASATAA

SEQ ID NO: 1057 - protein, 248 aa, Diguetia canities
GHQGPHRKTPWETPEMAENFMNNVRENLEASRIFPDELMKDMEAITNTMIAAVDGLEAQHRSSYASLQAMNTAFASSMAQLFATEQDYVDTEVIAGAIGKAYQQITGYENPHLASEVTRLIQLFREEDDLENEVEISFADTDNAIARAAAGAAAGSAAASSSADASATAEGASGDSGFLFSTGTFGRGGAGAGAGAAAASAAAASAAAAGAEGDRGLFFSTGDFGRGGAGAGAGAAAASAAAASAAAA

SEQ ID NO: 1058 - protein, 143 aa, Diguetia canities
GNTPFANKIMAEDFMNKFTNQLANSPYFSSQQKEDMSSIKDELISVIESMDSAHKSSAAKLQAMNMAFASAIADIAATEAYGADISLETSAIANALSEAFLQTTGVVNKRFISEIQELIYMFAQDASVQSNEIASSSSAAAAA

SEQ ID NO: 1059 - protein, 178 aa, Euprosthenops australis
GSSSLASHTTPWTNPGLAENFMNSFMQGLSSMPGFTASQLDDMSTIAQSMVQSIQSLAAQGRTSPNKLQALNMAFASSMAEIAASEEGGGSLSTKTSSIASAMSNAFLQTTGVVNQPFINEITQLVSMFAQAGMNDVSASASAGASAAASAGAPGYSPAPSYSSGGYASSAASAAAAA

SEQ ID NO: 1060 - protein, 157 aa, Kukulcania hibernalis
GFVVQGRQHNAANSPWSNAKTAEIFISKFISAILDSNAFTREQKEDMMSIGETIIPAMEKMSGSSKSIHAKLTALNMAFASSVAEIAVVEEGGSDINEKTYAIVAALNQAFLDTTGKVNKQFIAEIRDLVKMFASANEENEIGAALSAEIYTEQTGS

SEQ ID NO: 1061 - protein, 216 aa, Kukulcania hibernalis
GRAYGAGAGAGAEEGYGAGQGIANAVGRRRDRTGRGVFTVSTVSSNVVSQSEGLVEDTGPSGEGESAVSSAASAASAAQTGPERTGSEGASTRGGAGAGRGFGAGAGAGAESGKGGYGSGSGAGAGAGAGASGEGGFGEGQGYGAGAGAGASAGAGVGSGAGAGAGYGAGAGAGAGFGVGAGAGAGAGAGFGSGAGAGSGAGAGYGAGRAGGRGRG

SEQ ID NO: 1062 - protein, 178 aa, Nephila clavipes
GQNTPWSSTELADAFINAFMNEAGRTGAFTADQLDDMSTIGDTIKTAMDKMARSNKSSKGKLQALNMAFASSMAEIAAVEQGGLSVDAKTNAIADSLNSAFYQTTGAANPQFVNEIRSLINMFAQSSANEVSYGGGYGGQSAGAAASAAAAGGGGQGGYGNLGGQGAGAAAAAAASAA

SEQ ID NO: 1063 - protein, 178 aa, Nephila clavipes
GQNTPWSSTELADAFINAFLNEAGRTGAFTADQLDDMSTIGDTLKTAMDKMARSNKSSQSKLQALNMAFASSMAEIAAVEQGGLSVAEKTNAIADSLNSAFYQTTGAVNVQFVNEIRSLISMFAQASANEVSYGGGYGGGQGGQSAGAAAAAASAGAGQGGYGGLGGQGAGSAAAAAA

SEQ ID NO: 1064 - protein, 145 aa, Nephila clavipes
GQARSPWSDTATADAFIQNFLAAVSGSGAFTSDQLDDMSTIGDTIMSAMDKMARSNKSSQHKLQALNMAFASSMAEIAAVEQGGMSMAVKTNAIVDGLNSAFYMTTGAANPQFVNEMRSLISMISAASANEVSYGGGASAAAAAA

SEQ ID NO: 1065 - protein, 217 aa, Nephila madagascariensis
GIFIAGQANTPWSDTATADAFIQNFLGAVSGSGAFTPDQLDDMSTVGDTIMSAMDKMARSNKSSKSKLQALNMAFASSMAEIAAVEQGGQSMDVKTNAIANALDSAFYMTTGSTNQQFVNEMRSLINMLSAAAVNEVSYGGGASAAAATAGSYGQGPSGYAQGSSAASAAAPSGYVPSQTGQSGLGAAAAAAAVAPSGYGPSQQGPSGPGAATAAAA

SEQ ID NO: 1066 - protein, 146 aa, Araneus diadematus
GQNVADSPWSSNEKADFFIRSFNEVISRSSAFTSQQIDDMSSIGETLISSIDNMAKNGRSSTKKLQALNMAFASSMAEIAIAEQGGQSIDVKTNAIIDALNEAFIRTSGSVNNEFISEIRQLILMFSQVSMNDSASGSTAAANAGA

SEQ ID NO: 1067 - protein, 180 aa, Araneus diadematus
GARGIHVSSYTPFADPYTAENFARAFVNNIVNSGEFGAQDAADFDDITQSLLQAQNLHKRHDSNAKAKAMQMAFASSIAELVIAESEGANIQRRTSTVSNCMRNAMQSTTGGVDEEFMREIEDLIHLFSQESFNEVENYGPGTYYQSSTTGGAPVVTESVTVTVAGGGRGAPVNQGGQAP

SEQ ID NO: 1068 - protein, 173 aa, Araneus diadematus
GGGPTPWDSPSMAESFMSNFMSGIASSGAFSGGQIGDMQDITGTMQDSVNKMASTGRSSKSKLQAMNMAFASSMAEIAAAEAGGSSMAAKTSAITNALRGAFLQTTGVSNEQFINEIATLINLISQSNVNTVSASASAGGGGGYGAPAYGPSSYGPSQGPSSVSSVSVSSSAA

SEQ ID NO: 1069 - protein, 177 aa, Araneus diadematus
GRGIHVSILSNPNTAMTFARTFVSNIAGCGEFGSQGTEDFDDIMQSLIQAQSMGKGRHDTNAKAKAMQMALASSIAELIVEESGGVNMQQKTNAAINALRNALRSTSGKVDEGFVSEIVELVNLFSQEQFNEVDTGSSRQYYQSSTGGGQGGAPTVTETVTVSVGGGGGGAAQSSGP

SEQ ID NO: 1070 - protein, 163 aa, Araneus diadematus
GYPQQNYQPGIGIAQDDPLLDEGTGENFADVFTQTLENCGAFTHDEAQEYKEIIRVLTKAFGSFPDLQKAPPGVLKATAAGFASAVAERTAADVDHGQLFAKTRCVIQALREAFIVTTGVTNPYFISEVERLIEVFYITKGLPHSPVQQPLEEPQGQVQYQQQ

SEQ ID NO: 1071 - protein, 180 aa, Araneus diadematus
GASPTFSRSPWANPAKASSLMNCLITKIASSNVLPQQEKEDLESIMDTLMSAIKGASAKGKSSGAQLQAINMAVASSLAEIVVAEDVGNQASMAVKTQALSGALEQCFQTVMGTVDRKFIKEINDLISMFARQAATEANEIQDQGGFYAAGSSDSTSFQATSRTLQGSSQTTGGFGGAYP

SEQ ID NO: 1072 - protein, 167 aa, Araneus diadematus
GQSNPVNDDPYGFNETEKKFSDVFVDNVINSDAFTLMGENDIEEVTNILLTSIQLLKKSQDGDANQKKTLMVAFASSMAELILDRCDTTLGIEHKTEIITNALKNAYLQTTGKPNKPLIKEVRFLVALFLTLESPGFLDPLWNPYGRNPAFGLPPSYGVPLYPAPPQ

SEQ ID NO: 1073 - protein, 149 aa, Araneus diadematus
GLGQSPWKDASIAESFMNNFSNALARSGAFSSDQMDDIMSICDSIQSGIVRMDRSGKTSANKLQAMNMAFASAVAEIAIAEGGGQSAQVKTNAVADALASAFLQTTGVVNTQFINEIRTLISMFAQANVIDSSSGSVSASAGGAGQGGA

SEQ ID NO: 1074 - protein, 200 aa, Araneus diadematus
GFGQAATPWENTALAEAFINKFLESIGQTGTFSASQQDDMATIGDTLKTAMEKMAQSRKSSKSKLQALNMAFASSMAEIAVAEQGGLSIQAKTEAIASALSSAFLQTTGVINYQFVNEIKSLIYMIAQASTNEVGSSAASAGGGSGGGSYGQGSYVSASAAGTYGSAPQQGGYAPAQGPSQQGPVSQGPYGPSASVAAAA

SEQ ID NO: 1075 - protein, 128 aa, Araneus diadematus
GQQIWTNQAAVMAMTNNFVGCASQSGMLSADQMDDMAMMADTINMQATRMGPNAPRHKLKALNSAMAASIAEVAASSPPQSYSAVLNAIGSCLRDSMMQATGAVDEIFTTEVMKMVNLFAMDNANSVS

SEQ ID NO: 1076 - protein, 174 aa, Araneus diadematus
GQKIWTNPDAAMAMTNNLVQCAGRSGALTADQMDDLGMVSDSVNSQVRKMGANAPPHKIKAMSTAVAAGVAEVVASSPPQSYSAVLNTIGGCLRESMMQVTGSVDNTFTTEMMQMVNMFAADNANEVSASASGSGASYATGTSSAVSTSQATGYSTAGGYGTAAGAGAGAAAAA

SEQ ID NO: 1077 - protein, 181 aa, Aliatypus gulosus
GAASSSSTIITTKSASASAAADASAAATASAASRSSANAAASAFAQSFSSILLESGYFCSIFGSSISSSYAAAIASAASRAAAESNGYTTHAYACAKAVASAVERVTSGADAYAYAQAISDALSHALLYTGRLNTANANSLASAFAYAFANAAAQASASSASAGAASASGAASASGAGSAS

SEQ ID NO: 1078 - protein, 181 aa, Aliatypus gulosus
GAASSSSTIITTKSASAPAAADASAAATSSAASRSSANAAASAFAQSFSSILLESGYFGSIFGSSISSSYAAAIASAASRAAAESNGYTTHAYACAKAVASAVERVTSGADAYAYAQAISDALSHALLYTGRLNTANANSLASAFAYAFANAAAQASASSASAGAASASGAASASGAGSAS

SEQ ID NO: 1079 - protein, 181 aa, Aliatypus gulosus
GAASSSSTIITTKSASASAAADASAAATASAASRSSANAAASAFAQRFSSILLESGYFCSIFGSSISSSYAAAIASAASRAAAESNGYTTHAYACAKAVASAVERVTSGADAYAYAQAISGALSHALLYTGRLNTANANSLASAFAYAFANAAAQASASSASAGAASASGAASASGAGSAS

SEQ ID NO: 1080 - protein, 181 aa, Aliatypus gulosus; identical to SEQ ID NO: 1077

SEQ ID NO: 1081 - protein, 181 aa, Aliatypus gulosus
GAASSSSTIITTKSASASAAADASAAATASAASRSSANAAASAFAQSFSSILLESGYFCSIFGSSISSSYAAAIASAASRAAAESNGYTTHAYACAKAVASAVERVTSGADAYAYAQAISGALSHALLYTGRLNTANANSLASAFAYAFANAAAQASASSASAGAASASGAASASGAGSAS

SEQ ID NO: 1082 - protein, 181 aa, Aliatypus gulosus
GAASSSSTIITTKSASASAAADASAAATSSAASRSSANAAASAFAQSFSSILLESGYFGSIFGSSISSSYAAAIASAASRAAAESNGYTTHAYACAKAVASAVERVTSGADAYAYAQAISGALSHALLYTGRLNTANANSLASDFAYAFANAAAQATASSASAGAASASGAASASGAASAS

SEQ ID NO: 1083 - protein, 181 aa, Aliatypus gulosus
GAASSSSTIITTKSASASAAADASAAATASAASRSSANAAASAFAQSFSSILLESGYFGSIFGSSISSSYAAAIASAASRAAAESNGYTTHAYACAKAVASAVERVTSGADAYAYAQAISGALSYALLYTGRLNTANANSLASSFAYAFANAAAQASASSASAGAASASGAASASGAASAS

SEQ ID NO: 1084 - protein, 169 aa, Aptostichus sp.
GAAATSSSTSGASASSISSTTASSSSTGASSAAAGASHGAASAGGAFDFTRALFSELLESKIFSATTANFHSSTTASETLYATILKCLRELHFRYDECLQGATEVVSDLSVVSVGSGVHNYARVIAAFFERFFRKHDIPLSANYASRVAQYLISAMGSSVASADASSSS

SEQ ID NO: 1085 - protein, 169 aa, Aptostichus sp.
GAAATSSSTSGASASSISSTTASSSSTGASSAAAGASHGAASAGGAFDFTRALFSELLESKIFSATTANFHSSTTASETLYATILKCLRELHFRYDECLQGATEVVSDLSVVSVGSGVHNYAQVIAAFFERFFRKHDIPLSANYASRVAQYLISAMGSSVASADASSSS

SEQ ID NO: 1086 - protein, 169 aa, Aptostichus sp.; identical to SEQ ID NO: 1084

SEQ ID NO: 1087 - protein, 169 aa, Aptostichus sp.; identical to SEQ ID NO: 1084

SEQ ID NO: 1088 - protein, 169 aa, Aptostichus sp.; identical to SEQ ID NO: 1084

SEQ ID NO: 1089 - protein, 179 aa, Aptostichus sp.
GASSTTTATSESGITASSVATGAAAAISKTAAGSSSITYLARSFSRSLVSYLLQSAEFHSVFYSGISSGIASHIASTAGTSTAESLDLASLKSVIATACGKAMAATNSEGGPHAFANSLGSAITAVLIENAILTSENYDYFAKEFAHIFSISASKVVSATSAKSASEATSASWTAASRT

SEQ ID NO: 1090 - protein, 179 aa, Aptostichus sp.
GASSTTTATSESGITASSVATGAAAAISKTAAGSSSITYLARSFSRSLVSYLLQSAEFHSVFYSGISSGIASHIASTAGTSTAESLDLASLKSVIATACGKAMAATNSDGGPHAFANSLGSAITAVLIENAILTSENYDYFAKEFAHIFSISASKVVSATSAKSASEATSASWTAASRT

SEQ ID NO: 1091 - protein, 179 aa, Aptostichus sp.; identical to SEQ ID NO: 1089

SEQ ID NO: 1092 - protein, 142 aa, Araneus diadematus
GAGAGAGVGVGGAGGYGQGYGAGAGAGAGAGAGAGGAGGYGQGYGAGAAAAAGAGAGAAGGYGGGSGAGAGGAGGYGQGYGAGSGAGAGAAAAAGASAGAAGGYGGGAGVGAGAGAGAAGGYGQSYGSGAGAGAGAGAAAAA

SEQ ID NO: 1093 - protein, 122 aa, Araneus diadematus
GGAGGGGQGGLGSGGAGQGYGAGLGGQGGASAAAAAAGGQGGQGGQGGYGGLGSQGAGGAGQLGYGAGQESAAAAAAAAGGAGGGGQGGLGAGGAGQGYGAAGLGGQGGAGQGGGSGAAAAA

SEQ ID NO: 1094 - protein, 205 aa, Araneus diadematus
GGYGPGSGQQGPSQQGPGQQGPGGQGPYGPGASAAAAAAGGYGPGSGQQGPGGQGPYGPGSSAAAAAAGGNGPGSGQQGAGQQGPGQQGPGASAAAAAAGGYGPGSGQQGPGQQGPGGQGPYGPGASAAAAAAGGYGPGSGQGPGQQGPGGQGPYGPGASAAAAAAGGYGPGSGQQGPGQQGPGQQGPGGQGPYGPGASAAAAAA

SEQ ID NO: 1095 - protein, 240 aa, Araneus diadematus
GGYGPGYGQQGPGQQGPGGQGPYGPGASAASAASGGYGPGSGQQGPGQQGPGGQGPYGPGASAAAAAAGGYGPGSGQQGPGQQGPGQQGPGQQGPGGQGPYGPGASAAAAAAGGYGPGSGQQGPGQQGPGQQGPGQQGPGQQGPGQQGPGQQGPGQQGPGQQGPGGQGAYGPGASAAAGAAGGYGPGSGQQGPGQQGPGQQGPGQQGPGQQGPGQQGPGQQGPGQQGPYGPGASAAAAAA

SEQ ID NO: 1096 - protein, 232 aa, Araneus diadematus
GSGPGGYGPENQGPSGPGGYGPGGSGSSAAAAAAAASGPGGYGPGSQGPSGPGGSGGYGPGSQGASGPGGPGASAAAAAAAAAASGPGGYGPGSQGPSGPGAYGPGGPGSSAAAAAAAASGPGGYGPGSQGPSGPGVYGPGGPGSSAAAAAAAGSGPGGYGPENQGPSGPGGYGPGGSGSSAAAAAAAASGPGGYGPGSQGPSGPGGSGGYGPGSQGGSGPGASAAAAAAAA

SEQ ID NO: 1097 - protein, 193 aa, Atypoides riversi
GSATSSTTTTTTVSKSAAAAAAAAAAASSASSASRDSDRSSTAAEAYASSSAYASSNFENYLASDLSNSDEFESVYGSLYSSADAASYARSSAEYASNTLGLSKETSYALASAAAKAVSESGSGSSSYARAYAVAKSSAVVLQNSGVLSSSNSRSLSSAFAKAFASSSASSYASYQSRNTGTSRASSAGSGAA

SEQ ID NO: 1098 - protein, 193 aa, Atypoides riversi
GSATSSTTTTTTVSKSAAAAAAAAAAASSASSASRDSDRSSTAAEAYASSSAYASSNFENYLASDLSNSDEFESVYGSVYSSSDAASYARSSAGYASNTLGLSKETSYALASAAAKAVSESGSGSSSYARAYAVAKSSAAVLQNSGVLSSSNSRSLSSAFAKAFASSSASSYASYQSRNTGTSRASSAGSGAA

SEQ ID NO: 1099 - protein, 193 aa, Atypoides riversi
GSATSSTTTTTTVSKSAAAAAAAAAAASSASSASRDSDRSSTTAEAYASSSAYASSNFENYLASDLSNSDEFESVYGSVYSSSDAASYARSSAGYASNTLGLSKETSYALASAAAKAVSESGSGSSSYARAYAVAKSSAVVLQNSGVLSSSNSRSLSSAFAKAFASSSASSYASYKSRNTGTSRASSAGSGAA

SEQ ID NO: 1100 - protein, 193 aa, Atypoides riversi
GSATSSTTTTTTVSKSAAAAAAAAAAASSASSASRDSDRSSTAAEAYASSSAYASSNFENYLASDLSNSDEFESVYGSLYSSSDAASYARSSAGYASNTLGLSKETSYALASAAAKAVSESGSGSSSYARAYAVAKSSAVVLQNSGVLSSSNSRSLSSAFAKAFASSSASSYASYKSRNTGTSRASSAGSGAA

SEQ ID NO: 1101 - protein, 193 aa, Atypoides riversi
GSATSSTTTTTTVSKSAAAAAAAAAAASSASSARRDSDRSSSTAEAYASSSAYTSSNFENYLASDLSSSDEFESVYGSLYSSSDAASYARSSAEYASNTLGLSKETSYALASAAAKAVSESGSGSSSYARAYAVAKSSAVVLQNSGVLSSSNSRSLSSAFAKAFASSSASSYASYKSRNTGTSRASSAGSGAA

SEQ ID NO: 1102 - protein, 193 aa, Atypoides riversi
GSATSSTTTTTTVSKSAAAAAAAAAAASSASSASRDSDRSSTAAEAYASSSAYASSNFENYLASDLSNSDEFESVYGSLYSSADAASYASSSSEYASNTLGLSKETSYALASAAAKAVSESGSGSSSYARAYAVAKSSAVVLRNSGVLSSSNSRSLSSAFAKAFASSSASSYASYKSRNTGTSRASSAGSGAA

SEQ ID NO: 1103 - protein, 193 aa, Atypoides riversi
GSATSSTTTTTTVSKSAAAAAAAAAAASSASSARRDSDRSSSTAEAYASSSAYTSSNFENYLASDLSSSDEFESVYGSLYSSSDAASYARSSAEYASNTLGLSKETSYALASAAAKAVSESGSGSSSYARAYAVAKSSAVVLQNSGVLSSSNSRSLSSAFAKAFASSSASSYASSKSRNTGTSRASSAGSGAA

SEQ ID NO: 1104 - protein, 170 aa, Bothriocyrtum californicum
GSARSSSAAAASAAAFSSLSRALIYRLQQNQDFIYTFNSIETSDAARAITYSSALAAANAMGAGSSASQAVAFAAAKAAEGVPIRSSSYAYAEAITNAITPHFLALHLVNSANVDAFASDFTSSFASATASAASASAAASSAASAAAAATASSSSTSTSTKTTSSAAAAA

SEQ ID NO: 1105 - protein, 175 aa, Bothriocyrtum californicum
GSAISSSAAAASAAAFSSSLSRALIYRLQQNQDFIYTFNSIETSDAARAITYSSALAAANAIGAGSSASQAVAFAAAKAAEGVPIRSSSYAYAEAITNAITPHFLASHLVNSANVDAFASDFTSSFASATASAASASAAAASSAASAASAATTTASSSTSTSTTTTSSTAAAAAA

SEQ ID NO: 1106 - protein, 175 aa, Bothriocyrtum californicum
GAAASSRARAQAAAASSAAASAAAASSAFAEELAFLLWQSQDFISAFGSTASSSEATALARSSVMAAARAVGVAEAASAIASAAASAAAGVSHGSSAVAYARAIASAVARAFAQFGILTLSNAAAFGRQFARSFSSSAAASAASAASASAASAKSAAAAAASSSTTSTSTTTTST

SEQ ID NO: 1107 - protein, 175 aa, Bothriocyrtum californicum
GAAASSRTRAQAAAASSAAASAAAASSAFAEELTFLLRQSPNFISAFGSTASSSEATALARSSAIAAARAVGVAGAASAIASAAASAAAGVSHGSSAAAYARAIAFAVAQAFAPFGILTLAKAAAFASQFARSFSSSAAASAASAASASAASAKSAAAAAASSSTTSTSTTTTST

SEQ ID NO: 1108 - protein, 175 aa, Bothriocyrtum californicum
GAAASSRARAEAAAASSAAASAAAASSAFAEELTFLLRQSPNFISAFGSTASSSEATALARSSAIAAARAVGVAGAASAIASAAASAAAGVSHGSSAAAYARAIAFAVAQAFAPFGILTLAKAAAFASQFARSFSSSAAASAASAASASAASAKSAAAAAASSSTTSTSTTTTST

SEQ ID NO: 1109 - protein, 180 aa, Bothriocyrtum californicum
GAASAAGASSAAAASASAAAASFTQNLIYSLQESEIFYSALRSIASSGEASNLAYLAAERAAYGAGLDGIASSVASAAASAFANTALGSGAAAYAKALAYAIAPVLTRANIITLSNAASLATTYAKGFASSAASAAASASAASAAAASSAASASSAAAAAAASSSTSTSTTVSRSTAAAA

SEQ ID NO: 1110 - protein, 183 aa, Bothriocyrtum californicum
GAASAAGAAGASSAAAASASAAAASFTRNLIYSLQESEIFYSALRSIASSGEASNLAYLAAERAAYGAGLDGIASSVASAAASAFANTALGSGAAAYAKALAYAIAPVLTRANIITLSNAASLATTYARGFASSAASAAASASAASAAAASSAASASSAAAAAAASSSTSTSTTVSRSTAAAA

SEQ ID NO: 1111 - protein, 183 aa, Bothriocyrtum californicum; identical to SEQ ID NO: 1110

SEQ ID NO: 1112 - protein, 181 aa, Bothriocyrtum californicum
GAASAAGAAGASSAAAASASAAAASFSRNLIYSLQESEIFYSALRSIASSGEASNLAYLAAERAAYGAGLDGIASSVASAAASAFANTALGSGAAAYAKALAYAIAPVLTRANIITLSNAASLATTYARGFASSAASAAASASAASAAAASSAASASSAAAAASSSTSTSTTVSRSTAAAA

SEQ ID NO: 1113 - protein, 175 aa, Bothriocyrtum californicum
GAASAAGAAGASSAAAASASAAAASFTRNLIYSLQESEIFYSALRSIASSGEASNLAYLAAERAAYGAGLDGIASSVASAAASAFANTALGSGAAAYAKALAYAIAPVLTRANIITLSNAASLATTYARGFASSAASAAASASAASAAAASSAASASSSSAAAAAASSSTSTKAT

SEQ ID NO: 1114 - protein, 169 aa, Deinopis spinosa
GAGAGAGAGAGAGYSAGAGYGIGAGAGVGAGAGAGAGAGSGTGTGAGYGYGSSTQSSSTIYAATYQGGYGRVAGLGAGAGAGAGAGGGAGAGAGTGAGAGAGIGAGYGAGAGYGAGAGTGSGAGAGAGGGAAAGAGSGVGAGYGAGAGYGAGAGAGGGAGAGAGSGASA

SEQ ID NO: 1115 - protein, 174 aa, Deinopis spinosa
GAGYGAGAGAGGGAGAGTGYGGGAGYGTGSGAGYGAGVGYGAGAGAGGGAGAGAGGGTGAGAGGGAGAGYGAGTGYGAGAGAGGGAGAGAGAGAGAGAGAGSGAGAGYGAGAGYGAGAGAGGVAGAGAAGGAGAAGGAGAAGGAGAAGGAGAGAGAGSGAGAGAGGGARAGAGG

SEQ ID NO: 1116 - protein, 180 aa, Deinopis spinosa
GAGAGAGYGAGAGYGVGAGGGAGAGAGAGGGAGAGAGGGAGAGAGSGAGAGAGSGAGAGAGGGAGAGAGSGAGAGAGYGADAGVGGGAGAGTGYGGGAGYGSGAGAGSGAGAGAGYGAGAGSGTGVGFVAGTSNRVASTTYSTMYATGYNGGVGAGAGGGALSRLLAAGYGAGGGTATGA

SEQ ID NO: 1117 - protein, 174 aa, Deinopis spinosa
GAGYGAGAGAGAGSGAGLGAGAGAGFGAGAGAGVSAGAGAGIGAGAGAGVGAGAGAGFGAGAGAGVGAGFGAGAGAGVGAGAGAGVGAGAGAGSGAGVGAGVGAGFGAGVGAGVGAGAGAGAGVGAGAGVGAGAGAGVGAGAGAGVGAGAGAGVGAGAGAGFGAGVGAGVGAGA

SEQ ID NO: 1118 - protein, 158 aa, Deinopis spinosa
GIGAGAGAGSGVGAGAGAGSGTGTGAGYGYGSSAQSLSTRYSGAYQGSYGGAGAGAGAGAGAGAGAGSGAGAGSGTGYGAGSGAGAGAGSGSGAGAGTGAGYGAGSGAGVGVGAGAGSGYGAGGGAGAGAGAGGGAGAGTGGGTGAGAGAVYGAGAGA

SEQ ID NO: 1119 - protein, 159 aa, Deinopis spinosa
GAGLGAGTGAGAGAGASAGTGTGYGLGRYAQGTSVTYSSTYGNGYYGGLGAGSGTGAGGGAGAGAGSAAGAGAGAGSGAGLGAGAGAGAGAGFGAGAGAGVGAGAGAGIGAGAGAGVGAGAGAGFGAGVGGGAGAGSGAGVGAGVGAGVGAGAVVGAGA

SEQ ID NO: 1120 - protein, 180 aa, Deinopis spinosa
GAYSAAAAAAATATSGGAPGGYGGYGPGIGGAYGPASSTGTGSGSGSGAGAAGGGGSGGLGSSGGNGGLGSGNGGSGASAAASASAASSSPGSGGYGPGQGAGFGSGSAAAGGSGTGSGAGGPGSGGYGGPQFFASNTFASAYGGQGLLGTSGYGTGQGGASGTGSSGGGGSGSGTGSNS

SEQ ID NO: 1121 - protein, 175 aa, Deinopis spinosa
GASSAAAAAAATATSGGAPGGYGGYGPGIGGAFVPASTTGTGSGSGSGAGAAGSGGLGGLGSSGGSGGLGGGNGGSGASAAASAAAASSSPGSGGYGPGQGVGSGSGSGAAGGSGTGSGAGGPGSGGYGGPQFFASAYGGQGLLGTSGYGNGQGGASGTGSGGVGGSGSGAGSNS

SEQ ID NO: 1122 - protein, 233 aa, Dolomedes tenebrosus
GGAGSGQGGYGGQGGLGGYGQGAGAGAAAATAAGGAGSGQGDYGDQGGLGGYGQGSGAGSATAPAAGGSGFGQGGFGNRGGKGAYGQSAGAGVGAAATAAAGGAGSGQGGYGDQGGLGGYGQGAGAGAASAAAGGGDGYEQGGYGNQGGLGSFGQGAGAGAAAAASAGGAGSGRGGYGDQGGLGGYGQGAGAGAASAAAGGGDGYGQGYYGDQGGRGGYGQGSGAGSATAAAA

SEQ ID NO: 1123 - protein, 278 aa, Dolomedes tenebrosus
GGAGFGQGGYGQGGYGNQGGLGSFGQGAGAGAAAAASAGGAGSGRGGYGDQGGLGGYGQGAGAGAAAAAAGGGDGYGQGGYGNQGGLGSFGQGAGAGAAAAASAGGAGSGRGGYGQGGYGNQGGLGSFGQGAGAGAAAAASAGGAGSGRGGYGDQGGLGGYGQGAGSGAAAAAAGGGDGYGQGGYGNQGGLGSFGQGAGAGAAAAASAGGAGSGRGGYGQGGYGNQGGLGSFGQGAGAGAAAAASAGGAGSGRGGYGDQGGLGGYGQGAGAGAASAAA

SEQ ID NO: 1124 - protein, 169 aa, Dolomedes tenebrosus
GGGDGYGQGGYGNQRGVGSYGQGAGAGAAATSAAGGAGSGRGGYGEQGGLGGYGQGAGAGAASTAAGGGDGYGQGGYGNQGGRGSYGQGSGAGAGAAVAAAAGGAVSGQGGYDGEGGQGGYGQGSGAGAAVAAASGGTGAGQGGYGSQGSQAGYGQGAGFRAAAATAAA

SEQ ID NO: 1125 - protein, 163 aa, synthetic construct
  REGION 1..163: note = Description of Artificial Sequence: Synthetic polypeptide
GAYAYAYAIANASQIAASVASAVASSASAAAAAASSSAAAAAGASSAAGAASSSSTTTTTSTSSSAAAAAAAAAAASASGASSASAAASASAAASAFSSALISDLLGIGVFGNTFGSIGSASAASSIASAAAQAALSGLGLSYLASAGASAVASAVAGVGVGA

SEQ ID NO: 1126 - protein, 164 aa, Euagrus chisoseus
GAYAYAYAIANAFASILANTGLLSVSSAASVASSVASAIATSVSSSSAAAAASASAAAAASASAASSASASSSASAAAAAGASAAAGAASSASASAAASAFSSAFISALLGFSQFNSVFGSITSASLGLGIAANAVQSGLASLGLGAAASAAASAVANAGLNGS

SEQ ID NO: 1127 - protein, 178 aa, Euagrus chisoseus
GAYAYATAIASAIGNALLGAGFLTAGNASQIAASVASAVASSASAAAAAASSSAAAAGASSAAGAASSSSTTTTTSTSSSAAAAAAAAAAASASGASSASAAASASAAASAFSSALIGDLLGIGVFGNTFGSIGSASAASSIASAAAQAALSGLGLSYLASAGASAVASAVAGVGVGA

SEQ ID NO: 1128 - protein, 252 aa, Plectreurys tristis
GAGAGAGAGAGAGAGAGSGASTSVSTSSSSGSGAGAGAGSGAGSGAGAGSGAGAGAGAGGAGAGFGSGLGLGYGVGLSSAQAQAQAQAAAQAQAQAQAQAYAAAQAQAQAQAQAQAAAAAAAAAAAGAGAGAGAGAGAGAGAGSGASTSVSTSSSSGSGAGAGAGSGAGSGAGAGSGAGAGAGAGGAGAGFGSGLGLGYGVGLSSAQAQAQAQAAAQAQAQAQAQAYAAAQAQAQAQAQAQAAAAAAAAAAA

SEQ ID NO: 1129 - protein, 252 aa, Plectreurys tristis
GAGAGAGAGAGAGAGAGSGASTSVSTSSSSGSGAGAGAGSGAGSGAGAGSGAGAGAGAGGAGAAFGSGLGLGYGVGLSSAQAQAQAQAAAQAQADAQAQAYAAAQAQAQAQAQAQAAAAAAAAAAAGAGAGAGAGSGAGAGAGSGASTSVSTSSSSGSGAGAGAGSGAGSGAGAGSGAGAGAGAGGAGAGFGSGLGLGYGVGLSSAQAQAQAQAAAQAQADAQAQAYAAAQAQAQAQAQAQAAAAAAAAAAA

SEQ ID NO: 1130 - protein, 252 aa, Plectreurys tristis
GAGAGAGAGSGAGAGAGSGASTSVSTSSSSGSGAGAGAGSGAGSGAGAGSGAGAGAGAGGAGAGFGSGLGLGYGVGLSSAQAQAQSAAAARAQADAQAQAYAAAQAQAQAQAQAQAAAAAAAAAAAGAGAGAGAGAGAGAGAGSGASTSVSTSSSSASGAGAGAGSGAGSGAGAGSGAGAGAGAGGAGAGFGSGLGLGYGVGLSSAQAQAQAQAAAQAQAQAQAQALAAAQAQAQAQAQAQAAAATAAAAAA

SEQ ID NO: 1131 - protein, 194 aa, synthetic construct
  REGION 1..194: note = Description of Artificial Sequence: Synthetic polypeptide
GQGTDSVASSASSSASASSSATGPDTGYPVGYYGAGQAEAAASAAAAAAASAAEAATIAGLGYGRQGQGTDSSASSVSTSTSVSSLATGPGSRYPVRDYGADQAEAAASAAAAASAAEEIASLGYGRQGQGTDSVASSASSSASASSSATGPDTGYPVGYYGAGQAEAAASAAAAAAASAAEAATIAGLGYGRQ

SEQ ID NO: 1132 - protein, 198 aa, Plectreurys tristis
GQGTDSSASSVSTSTSVSSSATGPDTGYPVGYYGAGQAEAAASAAAAAAASAAEAATIAGLGYGRQGQGTDSSASSVSTSTSVSSSATGPDMGYPVGNYGAGQAEAAASAAAAAAASAAEAATIASLGYGRQGQGTDSSASSVSTSTSVSSSATGPGSRYPVRDYGADQAEAAASAAAAAAAAASAAEEIASLGYGRQ

SEQ ID NO: 1133 - protein, 198 aa, Plectreurys tristis
GQGTDSVASSASSSASASSSATGPDTGYPVGYYGAGQAEAAASAAAAAAASAAEAATIAGLGYGRQGQGTDSSASSVSTSTSVSSSATGPGSRYPVRDYGADQAEAAASATAAAAAAASAAEEIASLGYGRQGQGTDSVASSASSSASASSSATGPDTGYPVGYYGAGQAEAAASAAAAAAASAAEAATIAGLGYGRQ

SEQ ID NO: 1134 - protein, 207 aa, Plectreurys tristis
GVSLSSSQATSVASAISSSLYAFNYQASAASSAAAQSSAQTASTSAKQTAASTSASTAATSTTQTAATTSASTAASSQTVQKASTSSAASTAASKSQSSSAGSSRTTSTAAASASSSYAFAQSLSQYLLSSQQFTTAFASSTAVASSQQYAEAMAQSVATSLGLGYTYASALSVAMAQAISGVGGGASAYSYATAISQAISRALTSS

SEQ ID NO: 1135 - protein, 206 aa, synthetic construct
  REGION 1..206: note = Description of Artificial Sequence: Synthetic polypeptide
GVSLSSSQATSVASAISSSLYAFNYQASAASSAAAQSSAQTASTSAKQTAASTSASTAATSTTQTAATTSASTAASSQTVQKASTSSAASTAASKSQSSSVGSSTTSTAAASASSSYAFAQSLSQYLLSSQQFTTAFASSTAVASSQQYAEAMAQSVATSLGLGYTYTSALSVAMAQAISGVGGGASAYSYATAISQAISRVLTSS

SEQ ID NO: 1136 - protein, 206 aa, Plectreurys tristis
GISLSSSQATSVASAISSSLYAFNYQASAASSAAAQSSAQTASTSAKQTAASTSASTAATSTTQTAATTSASTAASSQTVQKASTSSAASTAASKSQSSSVGSSTTSTAAASASSSYAFAQSLSQYLLSSQQFTTAFASSTAVASSQQYAEAMAQSVATSLGLGYTYTSALSVAMAQAISGVGGGASAYSYATAISQAISRVLTSS

SEQ ID NO: 1137 - protein, 181 aa, synthetic construct
  REGION 1..181: note = Description of Artificial Sequence: Synthetic polypeptide
GSSAYDSQFSESSSASSAAASAFSEQTSYDISSDLSSASSATAAAASSSAYESQFSDASSGSSAAAAASSQQNSYDTDALYSASSAASAAASASAYELEFSDASSSSSAVAVASSQQGSYDTSSDFSSASSAAAAAASAYESKFLDASSSSSAAAAASSQQSSYETSSDLVSASSAAAAAA

SEQ ID NO: 1138 - protein, 177 aa, Plectreurys tristis
GASAYQSQFLDASSSSNAAATTSSRQSSYDTSSDFSSASIAAAAAASASSYESQFSDASSSSNAAAAASSQQSSYDTSSDLVSAASASAYESQFLDASSSSNAAATTSSQQSSYDTSSDFSSASIAAAAAASASSYESQFSDASSSSNAAAAASSQQSSYDTSSDLVSASSAAAAAA

SEQ ID NO: 1139 - protein, 228 aa, Plectreurys tristis
GASSYESQFSDASSSSNAAAAASSQQSSYDTSSDLVSASSAAAAAASASAYESQFSDASSSRNAAAAASSQQSSYDTSSDLVSASSAAAAAASASSYESQFLDASSSSNAAATTSSQQSSYDTSSDFSSASIAAAVAASASSYESQFSDASSSSKAAAAASSQQSSYDTSSDLVSASSAAAAAASASSYESQFSDASSSSNAAAAASSQQSSYDTSSDFSSANSAALA

SEQ ID NO: 1140 - protein, 239 aa, synthetic construct
  REGION 1..239: note = Description of Artificial Sequence: Synthetic polypeptide
GAAQKQPSGESSVATASAAATSVTSGGAPVGKPGVPAPIFYPQGPLQQGPAPGPSNVQPGTSQQGPIGGVGGSNAFSSSFASALSLNRGFTEVISSASATAVASAFQKGLAPYGTAFALSAASAAADAYNSIGSGANAFAYAQAFARVLYPLVRQYGLSSSGKASAFASAIASSFSSGTSGQGPSIGQQQPPVTISAASASAGASAAAVGGGQVGQGPYGGQQQSTAASASAAAATATS

SEQ ID NO: 1141 - protein, 239 aa, Plectreurys tristis; identical to SEQ ID NO: 1140

SEQ ID NO: 1142 - protein, 239 aa, Plectreurys tristis
GAAQKQPSGESSVATASAAATSVTSGGAPVGKPGVPAPIFYPQGPLQQGPAPGPSNVQPGTSQQGPIGGVGGSNAFSSSFASALSLNRGFTEVISSASATAVASAFQKGLAPYGTAFALSAASAAADAYNSIGSGANAFAYAQAFARVLYPLVQQYGLSSSAKASAFASAIASSFSSGTSGQGPSIGQQQPPVTISAASASAGASAAAVGGGQVGQGPYGGQQQSTAASASAAAATATS

SEQ ID NO: 1143 - protein, 239 aa, Plectreurys tristis
GGAQKQPSGESSVATASAAATSVTSAGAPVGKPGVPAPIFYPQGPLQQGPAPGPSNVQPGTSQQGPIGGVGGSNAFSSSFASALSLNRGFTEVISSASATAVASAFQKGLAPYGTAFALSAASAAADAYNSIGSGANAFAYAQAFARVLYPLVQQYGLSSSAKASAFASAIASSFSSGTSGQGPSNGQQQPPVTISAASASAGASAAAVGGGQVSQGPYGGQQQSTAASASAAAATATS

SEQ ID NO: 1144 - protein, 239 aa, Plectreurys tristis
GGAQKQPSGESSVATASAAATSVTSAGAPGGKPGVPAPIFYPQGPLQQGPAPGPSNVQPGTSQQGPIGGVGGSNAFSSSFASALSLNRGFTEVISSASATAVASAFQKGLAPYGTAFALSAASAAADAYNSIGSGANAFAYAQAFARVLYPLVQQYGLSSSAKASAFASAIASSFSSGTSGQGPSIGQQQPPVTISAASASAGASAAAVGGGQVGQGPYGGQQQSTAASASAAAATATS

SEQ ID NO: 1145 - protein, 242 aa, Plectreurys tristis
GGAQKQPSGESSVATASAAATSVTSAGAPVGKPGVPAPIFYPQGPLQQGPAPGPSYVQPATSQQGPIGGAGRSNAFSSSFASALSGNRGFSEVISSASATAVASAFQKGLAPYGTAFALSAASAAADAYNSIGSGANAFAYAQAFARVLYPLVQQYGLSSSAKASAFASAIASSFSSGAAGQGQSIPYGGQQQPPMTISAASASAGASAAAVKGGQVGQGPYGGQQQSTAASASAAATTATA

SEQ ID NO: 1146 - protein, 245 aa, Plectreurys tristis
GGAQKHPSGEYSVATASAAATSVTSGGAPVGKPGVPAPIFYPQGPLQQGPAPGPSNVQPGTSQQGPIGGVGESNTFSSSFASALGGNRGFSGVISSASATAVASAFQKGLAPYGTAFALSAASAAADAYNSIGSGASASAYAQAFARVLYPLLQQYGLSSSADASAFASAIASSFSTGVAGQGPSVPYVGQQQPSIMVSAASASAAASAAAVGGGPVVQGPYDGGQPQQPNIAASAAAAATATSS

SEQ ID NO: 1147 - protein, 194 aa, Agelenopsis aperta
GSLGYQLALQTANSLGIQNAASLASAVAQAVSAVGVRASSYAYASAISNTVGQFLTSQGLLSQSNASALASSFASAFAASAASASASASSSSYAQSSAAAQSQSAASAFTRAASAAASQASSQSASQAGSYGRTTTTSTSQSGAQAGSQAASQASSSSWAAASASAFAQSSASSLASSSAFSSAFSSASSASAV

SEQ ID NO: 1148 - protein, 194 aa, Agelenopsis aperta
GSLCYQLALQTANSLGIQNAASLASAVSQAVSAVGVRASSYAYASAISNTVGQFLISQGLLSQSNASALASSFASAFAASAASASASASSSSYAQSSAAAQSQSAASAFSRAASAAASQASSQSASQAGSYGRTTTTSTSESGAQAASQAASQASSSSWAAASASAFAQSSASSLASSSAFASAFSSASSTSAV

SEQ ID NO: 1149 - protein, 182 aa, Araneus gemmoides
GNVGYQLGLKVANSLGLGNAQALASSLSQAVSAVGVGASSNAYANAVSNAVGQVLAGQGILNAANAGSLASSFASALSSSAASVASQSASQSQAASQSQAAASAFRQAASQSASQSASRAGSQSSTKTTSTSTSGSQADSRSASSSASQASASAFAQQSSASLSSSSSFSSAFSSATSISAV

SEQ ID NO: 1150 - protein, 182 aa, Araneus gemmoides
GNVGYQLGLKVANSLGLGNAQALASSLSQAVSAVGVGASSNAYANAVSNAVGQVLAGQGILNAANAGSLASSFASALSSSAASVASQSASQSQAASQSQAAASAFRQAASQSASQSDSRAGSQSSTKTTSTSTSGSQADSRSASSSASQASASAFAQQSSASLSSSSSFSSAFSSATSISAV

SEQ ID NO: 1151 - protein, 182 aa, Araneus gemmoides; identical to SEQ ID NO: 1149

SEQ ID NO: 1152 - protein, 176 aa, synthetic construct
  REGION 1..176: note = Description of Artificial Sequence: Synthetic polypeptide
GSQAASQSASSSASQASASSFAQASSASLAASSSFSSAFSSATSLSALGNVAYQLGFNVGTNLGLTNAAGLAAAISQAASSVGVGASSGAYANALSNAAAQFLSAQGILNTVNAGSLASSFASALSSVAASAAAQASSQSQAASSAFSRAASQSASQSAARSGAQSSSSTTTTSTS

SEQ ID NO: 1153 - protein, 176 aa, Argiope amoena
GSQAASQSASSSASQASASSFAQASSASLAASSSFSSAFSSATSLSALGNVAYQLGFDVGTNLGLTNAAGLAAAFSQAASSVGVGGSSGAYANALSNAAAQFLSAQGILNTVNAGSLASSFASALSSVAASAAAQASSQSQAASSAFSRAASQSASQSAARSGAQSSSSTTTTSSS

SEQ ID NO: 1154 - protein, 180 aa, Argiope argentata
GNVAYQLGFNVANTLGLGNAAGLGAALSQAVSSVGVGASSGTYANAVSNAVGQFLAGQGILNAANAASLASSFASALSASAASVASSSAAQSASQSQAAASAFSRAASQSASQSAALSGAQSSSTTTTTSTSGSQAASQSASSSASQASASSFAQASSASLAASSSFSSAFSSANTLSAL

SEQ ID NO: 1155 - protein, 180 aa, Argiope argentata
GNVAYQLGFNVANTLGLGNTAGLGAALSQAVSSVGVGASSATYANAVSNAVGQFLAGQGILNGANAASLASSFASALSASAASVASSSAAQSATQSQAAASAFSRAASQSASQSAARSGAQSSSTTTTSSTSGSQAASQSASSSASQASASSFAQASSASLAASSSFSSAFSSANTLSAL

SEQ ID NO: 1156 - protein, 180 aa, Argiope argentata
GNVAYQLGFNVANTLGLGNASGLGAALSQAVSSVGVGASSGTYANAVSNAVGQFLAGQGILNGANAASLASSFASALSASAASVASSSAAQSASQSQAAASAFSRAASQSASQSAARSGAQSSSTTTTSSTSGSQAASQSASSSASQASASSFAQASSASLAASSSFSSVFSSANTLSAL

SEQ ID NO: 1157 - protein, 180 aa, Argiope aurantia
GSLASSFASALSASAASVASSAAAQAASQSQAAASAFSRAASQSASQSAARSGAQSSSTTTTTSTAGSQAASQFASSAASQASASSFARASSASLAASSSFSSAFSSANSLSALGNVGYQLGFNVANNLGIGNAAGLGNALSQAVSSVGVGASSSSYANAVSNAVGQLLAGQGILNAANA

SEQ ID NO: 1158 - protein, 180 aa, Argiope aurantia
GSLASSFASALSASAASVASSAAAQAASQSQAAASAFSRAASQSASQSAARSGAQSISTTTTTSTAGSQAASQSASSAASQASASSFARASSASLAASSSFSSAFSSANSLSALGNVGYQLGFNVANNLGIGNAAGLGNALSQAVSSVGVGASSSTYANAVSNAVGQFLAGQGILNAANA

SEQ ID NO: 1159 - protein, 180 aa, Argiope aurantia
GSLASSFASALSASAASVASSAAAQAASQSQAAASAFSRAASQSASQSAARSGAQSSSTTTTTSTAGSQAASQFASSAASQASASSFARASSASLAASSSFSSAFSSANSLSALGNVGYQLGFNVANNLGISNAAGLGNALSQAVSSVGVGASSSSYANAVSNAVGQFLAGQGILNAANA

SEQ ID NO: 1160 - protein, 180 aa, Argiope aurantia
GSLASSFASALSASAASVASSAAAQAASQSQAAASAFSRAASQSASQSAARSGAQSFSTTTTTSTAGSQAASQSASSAASQASASSFARASSASLAASSAFSSAFSSANSLSALGNVAYQLGFNVANTLGIGNAAGLGNALSQAVSSVGVGASSSTYANAVSNAVGQFLAGQGVLNAGNA

SEQ ID NO: 1161 - protein, 180 aa, Argiope bruennichi
GNVGYQLGFNVANTLGIGNAPGLGNALSQAASSVGVGASSSAYANAVSNAVGQFLAGQGVLNAGNAGSLASSFANALSASAASVASSAAAQSAFQSQAAASAFSRAASQSASRGAARSGAQSSSTTTTTSTSGSQAASQSASSAAAQASASSFAQASSASLAASSAFSSAFSSANSLSAL

SEQ ID NO: 1162 - protein, 180 aa, Argiope bruennichi
GNVGYQLGFNVANTLGIGNAPGLGNALSQAVSSVGVGASSSAYANAVSNAVGQFLAGQGVLNIGNAGSLASSFANALSASAASVASSAAAQSASQSQAAASAFSRAASQSASRGAARSGAQSSSTTTTTSTSGSQAASQSASSAAAQASASSFAQASSASLAASSAFSSAFSSANSLSAL

SEQ ID NO: 1163 - protein, 180 aa, Argiope bruennichi; identical to SEQ ID NO: 1162

SEQ ID NO: 1164 - protein, 180 aa, Argiope bruennichi
GNVGYQLGFNVANTLGIGNAPGLGNALSQAVSSVGVGASSRAYANAVSNAVGQFLAGQGVLNVGNAGSLASSFANALSASAASVASSAAAQSASQSQAAASAFSRAASQSASRGAARSGAQSSSTTTTTSTSGSQAASQSASSAAAQASASSFAQASSASLAASSAFSSAFSSANSLSAL

SEQ ID NO: 1165 - protein, 180 aa, Argiope bruennichi
GNVGYQLGFNVANTLGIGNAPSLGNALSQAVSSVGVGASSSAYANAVSNAVGQFLAGQGVLNAGNAGSLASSFANALSASAASVASSAAAQSAFQSQAAASAFSRAASQSASQSAARSGAQSSSTTTTTSTSGSQAASQSASSAAAQASASSFAQASSASLAASSAFSSAFSSANSLSAL

SEQ ID NO: 1166 - protein, 180 aa, Argiope bruennichi; identical to SEQ ID NO: 1162

SEQ ID NO: 1167 - protein, 180 aa, Argiope bruennichi
GNVGYQLGFNVANTLGIGNAPGLGNALSQAVSSVGVGASSSAYANAVSNAVGQFLAGQGVLNAGNAGSLASSFANALSASAASVASSAAAQSAFQSQAAASAFSRAASQSASQSAARSGAQSSSTTTTTSTSGSQAASQSASSAAAQASASSFAQASSASLAASSAFSSAFSSANSLSAL

SEQ ID NO: 1168 - protein, 180 aa, Argiope bruennichi; identical to SEQ ID NO: 1162

SEQ ID NO: 1169 - protein, 180 aa, Argiope bruennichi
GNVGYQLGFNVANTLGIGNAPGLGNALSQAVSSVGVGASSRAYANAVSNAVGQFLAGQGVLNAGNAGSLASSFANALSASAASVASSAAAQSASQSQAAASAFSRAASQSASQSAARSGAQSSSTTTTTSASGSQAASQSASSAAAQASASSFAQASSASLAASSAFSSAFSSANSLSAL

SEQ ID NO: 1170 - protein, 180 aa, Argiope bruennichi; identical to SEQ ID NO: 1167

SEQ ID NO: 1171 - protein, 180 aa, Argiope bruennichi
GSLASSFASALSASAASVASSAAAQSASQSQAAASAFSRAASQSASQSAARSGAQSSSTTTTTSASGSQAASQSASSAASQASASSFAQASSASLAASSSFSSAFSSANSLSALGNVAYQLGFNVANTLGIGNAPGLGAALSQAVSSVGVGASSSTYANVVSNAVGQFLAGQGVLNAANA

SEQ ID NO: 1172 - protein, 180 aa, Argiope bruennichi; identical to SEQ ID NO: 1171

SEQ ID NO: 1173 - protein, 180 aa, Argiope bruennichi; identical to SEQ ID NO: 1171

SEQ ID NO: 1174 - protein, 180 aa, Argiope bruennichi; identical to SEQ ID NO: 1171

SEQ ID NO: 1175 - protein, 180 aa, Argiope bruennichi; identical to SEQ ID NO: 1171

SEQ ID NO: 1176 - protein, 180 aa, Argiope bruennichi; identical to SEQ ID NO: 1171

SEQ ID NO: 1177 - protein, 180 aa, Argiope bruennichi
GSLASSFASALSASAASVASSAAAQSASQSQAAASAFSRAASQSGSQSAARSGAQSSSTTTTTSASGSQAASQSASSAASQASASSFAQASSASLAASSSFSSAFSSANSLSALGNVAYQLGFNVANTLGIGNAPGLGAALSQAVSSVGVGASSSTYANVVSNAVGQFLAGQGVLNAANA

SEQ ID NO: 1178 - protein, 180 aa, Argiope bruennichi; identical to SEQ ID NO: 1171

SEQ ID NO: 1179 - protein, 180 aa, Argiope bruennichi; identical to SEQ ID NO: 1171

SEQ ID NO: 1180 - protein, 180 aa, Argiope bruennichi
GSLASSFASALSASAASVASSAAAQSASQGQAAASAFSRAASQSASQSAARSGAQSSSTTTTTSASGSQAASQSASSAASQASASSFAQASSASLAASSSFSSAFSSANSLSALGNVAYQLGFNVANTLGIGNAPGLGAALSQAVSSVGVGASSSTYANVVSNAVGQFLAGQGVLNAANA

SEQ ID NO: 1181 - protein, 193 aa, Atypoides riversi; identical to SEQ ID NO: 1097

SEQ ID NO: 1182 - protein, 193 aa, Atypoides riversi; identical to SEQ ID NO: 1098

SEQ ID NO: 1183 - protein, 193 aa, Atypoides riversi; identical to SEQ ID NO: 1099

SEQ ID NO: 1184 - protein, 193 aa, Atypoides riversi; identical to SEQ ID NO: 1100

SEQ ID NO: 1185 - protein, 193 aa, Atypoides riversi; identical to SEQ ID NO: 1101

SEQ ID NO: 1186 - protein, 193 aa, Atypoides riversi; identical to SEQ ID NO: 1102

SEQ ID NO: 1187 - protein, 193 aa, Atypoides riversi; identical to SEQ ID NO: 1103

SEQ ID NO: 1188 - protein, 186 aa, synthetic construct
  REGION 1..186: note = Description of Artificial Sequence: Synthetic polypeptide
GSFASASAYAFAFASAFSQVLSNYGLLNINNAYSLASSIANAASASASSAAAAAASSSSAAAAAAAASGAAGSAAATSTTTSTSSSTAAAAASAAASAAASASGAARAAGASSAASDASASSSLQQSLGSALAQSSSFAAAFAQANSAASAAAIAYALAQIVANQIGFSSYSSAFASAASSAVSSL

SEQ ID NO: 1189 - protein, 186 aa, Avicularia juruensis
GSFASASAYAFAFASAFSQVLSNYGLLNISNAYSLASSIASAASASASSAAAAAASSSAAAAGAAAASGAAGSAASTSTTTSTSTSTAAAAASAAAAAAASASGAARAAGASSAASAASASSSLQQSLGSALAQSSSFAAAFAQANSAASAAAIAYALAQTVANQIGFSSYSSAFATAASSAVSSL

SEQ ID NO: 1190 - protein, 186 aa, Avicularia juruensis
GSFASASAYAFAFASAFSQVLSNYGLLNISNAYSLASSIANAASASASSAAAAAASSSSAAAGAAAASGAAGSVAATSTTTTASTSTAAAAASAAAAAAASASGAARAAGASSAASAASASSSLQQSLGSALAQSSSFAAAFAQANSAASAAAIAYALAQTVANQIGFSSYSSAFASAASSAVYSL

SEQ ID NO: 1191 - protein, 188 aa, Deinopis spinosa
GASASAYASAISNAVGPYLYGLGLFNQANAASFASSFASAVSSAVASASASAASSAYAQSAAAAQAQAASSAFSQAAAQSAAAAIAGASAGAGASAGAGASAGAGAVAASQAAASSSASAVASAFAQSASYALASSSAFASAFASATSAGYLGSLAYQLGLTTAYNLGLSNAQAFANTLSQAIVGVGV

SEQ ID NO: 1192 - protein, 199 aa, Deinopis spinosa
GASASAYASAISNAVGPYLYGLGLFNQANAASFASSFASAVSSAVASASASAASSAYAQSAAAQAQAASSAFSQAAAQSAAAASAGASAGAGASAGAGAVAGAGAVAGAGAVAGASAAAASQAAASSSASAVASAFAQSASYALASSSAFANAFASATSAGYLGSLAYQLGLTTAYNLGLSNAQAFASTLSQAVTGVGL

SEQ ID NO: 1193 - protein, 206 aa, Deinopis spinosa
GASASAYASAISNAVGPYLYGLGLFNQANAASFASSFASAVSSAVASASASAASSAYAQSAAAAQAQAASSAFSQAAAQSAAAASAGASAGAGASAGAGASAGAGASAGAGASAGAGAIAGAGAAATSLAAASSSASAVASAFAQSASSALASSSAFANAFASATSVSALNSIAYQMGVSAANILGISNAQGFANALSQAVGVVGV

SEQ ID NO: 1194 - protein, 184 aa, Latrodectus hesperus
GILTQENAAGLASSVSSGISSAASSVAAQAASAAQSSAFAQSQAAAQAFSQAASRSASQSAAQAGSSSTSTTTTTSQAASQAASQSASSSSSAASQSAFSQASSSALASSSSFSSAFSSASSASAVGQVGYQIGLNAAQTLGISNAPALADAVSQAVRTVGVGASPFQYANAVSNAFGQLLGGQ

SEQ ID NO: 1195 - protein, 184 aa, Latrodectus hesperus
GILTQENAAGLASSVSSAISSAASSVAAQAASAAQSSAFAQSQAAAQAFSQAASRSASQSAAQAGSSSTSTTTTTSQAASQAASQSASSSSSAASQSAFSQASSSALASSSSFSSAFSSASSASAVGQVGYQIGLNAAQTLGISNAPALADAVSQAVRTVGVGASPFQYANAVSNAFGQLLGGQ

SEQ ID NO: 1196 - protein, 184 aa, Latrodectus hesperus
GILTQENAAGLASSVSSAISSAASSVAAQAASAAQSSAFAQSQAAAQAFSQAASRSASQSAAQAGSSSTSTTTTTSQAASQAASQSASSSYSAASQSAFSQASSSALASSSSFSSAFSSASSASAVGQVGYQIGLNAAQTLGISNAPAFADAVSQAVRTVGVGASPFQYANAVSNAFGQLLGGQ

SEQ ID NO: 1197 - protein, 184 aa, Latrodectus hesperus; identical to SEQ ID NO: 1196

SEQ ID NO: 1198 - protein, 184 aa, Latrodectus hesperus
GILTQENAAGLASSVSSAISSAASSVAAQAASAAQSSAFAQSQAAAQALSQAASRSASQSAAQAGSSSTSTTTTTSQAASQAASQSASSSYSAASQSAFSQASSSALASSSSFSSAFSSASSASAVGQVGYQIGLNAAQTLGISSAPAFADAVSQAVRTVGVGASPFQYANAVSNAFGQLLGGQ

SEQ ID NO: 1199 - protein, 184 aa, Latrodectus hesperus
GILTQENAAGLASSVSSAISSAASSVASQAASAAQSSAFAQSQAAAQALSQAASRSASQSAAQAGSSSTSTTTTTSQAASQAASQSASSSYSAASQSAFSQASSSALASSSSFSSAFSSASSASAVGQVGYQIGLNAAQTLGISNAPAFADAVSQAVRTVGVGASPFQYANAVSNAFGQLLGEQ

SEQ ID NO: 1200 - protein, 171 aa, Nephila antipodiana
GVLNAGNASALAGSFARALSASAESQSFAQSQAYQQASAFQQAAAQSAAQSASRAGSTSSSTTTTTSGATSQAASQSASSSYSSAFAQAASSSLATSSAISRAFASVSSASAASSLAYNIGLSAARSLGIASDTALAGALAQAVGGVGAGASASAYANAIARAAGQFLATQ

SEQ ID NO: 1201 - protein, 171 aa, Nephila clavata
GIASDTALAGALAQAVAGVGAGASASTYANVIARAAGQFLATQGVLDAGNASALAGSFARALSASAESQSFAQSQAFQQASAFQQAASQSAGQSASRAGSTSSSTTTTTSAAASQAASQSASSSSSSAFAQAASSSLATSSAISRAFASVSSASAASSLAYTIGLSAARSL

SEQ ID NO: 1202 - protein, 171 aa, Nephila clavata; identical to SEQ ID NO: 1201

SEQ ID NO: 1203 - protein, 171 aa, Nephila clavata
GIASDTALAGALAQAVAGVGAGASASTYANVIARAAGQFLATQGVLDAGNASALAGSFARALLASAESQSFAQSQAFQQASAFQQAASQSAGQSASRSGSRSSSTTTTTSAAASQAESQSASSSSSSAFAQAASSSLATSSAISRAFASVSSASAASSLAYTIGLSAARSL

SEQ ID NO: 1204 - protein, 171 aa, Nephila clavata; identical to SEQ ID NO: 1201

SEQ ID NO: 1205 - protein, 171 aa, Nephila clavata; identical to SEQ ID NO: 1201

SEQ ID NO: 1206 - protein, 171 aa, Nephila clavata
GIASDTALAGALAQAVAGVGAGASASTYANVIARAAGQFLATQGVLDAGNASALAGSFARALSASAESQSFAQSQAFQQASAFQQAASQSAGQSASRAGSTSSSTTTTTSVAASQAASQSASSSSSSAFAQAASSSLATSSAISRAFASVSSASAASSLAYTIGLSAARSL

SEQ ID NO: 1207 - protein, 171 aa, Nephila clavata; identical to SEQ ID NO: 1201

SEQ ID NO: 1208 - protein, 171 aa, Nephila clavata; identical to SEQ ID NO: 1201

SEQ ID NO: 1209 - protein, 171 aa, Nephila clavipes
GDTAASYGNALSTAAGQFFATAGLLNAGNASALASSFARAFSASAESQSFAQSQAFQQASAFQQAASRSASQSAAEADSTSSSTTTTTSAARSQAASQSASSSYSSAFAQAASSSFAISSALSRAFSSVSSASAASSLAYSIGLSAARSLGIADATGLAGALARAVGALGQ

SEQ ID NO: 1210 - protein, 171 aa, Nephila clavipes
GATAASYGNALSTAAAQFFATAGLLNAGNASALASSFARAFSASAESQSFAQSQAFQQASAFQQAASRSASQSAAEAGSTSSSTTTTTSAARSQAASQSASSSYSSAFAQAASSSLATSSALSRAFSSVSSASAASSLAYSIGLSAARSLGIADAAGLAGVLARAAGALGQ

SEQ ID NO: 1211 - protein, 174 aa, Nephilengys cruentata
GQFLANQGILNTGNASSLASSFSSALSASAAAAQSQSFAQSQAAASAFQQAASQSASQSAAQSGSQSSSTTTTTSASGSQSASQSASSSSASASAFAQQSSASLAASSSFSQAFASAASASAVGNVAYQLGLSAAQSLGIANAGALASALAQSVSSVGVGASSSAYANAVAGAV

SEQ ID NO: 1212 - protein, 278 aa, synthetic construct
  REGION 1..278: note = Description of Artificial Sequence: Synthetic polypeptide
GSQAGSQAGSQAGSQAGSQAASQAGSQSASQASASSSASAFASASAFAQSASFALSSSSSFASAVSSASSVSALGTLGYQVGLQAAGSLGISNSQAFASSISQALTSVGVGASSSAYASAVSGVVAQYLSGTGVLTSANAQALASSFANVFAASAASASAAASASSAASAQSAAAALAQSQSAASAFSQAASQAFSQAASQAGSQAASQAGSQAASQAGSQAASQAGSQAASQAGSQAASQSGSGASSFTTTISRSSAGSQTGSQAGSQAGSQAGSQA

SEQ ID NO: 1213 - protein, 302 aa, Uloborus diversus
GSQAGSQAGSQAGSQAGSQAGSQAGSQAGSQAGSQAASQAGSQSASQASASSSASAFASASAFAQSASFALSSSSSFASAVSSASSISALGTLGYQVGLQAAGSLGISNSQAFASSISQALTSVGVGASSSAYASAVSGVVAQYLSGTGVLTSANAQALASSFANVFAASAASASAAASASSAASAQSTAAALAQSQSAASAFSQAASQAFSQAASQAGSQAASQAGSQAASQAGSQAASQAGSQAASQAGSQAASQAGSQAASQSGSGASSFTTTISRSSAGSQAGSQAGSQAGSQAGSQA

SEQ ID NO: 1214 - protein, 278 aa, Uloborus diversus; identical to SEQ ID NO: 1212

SEQ ID NO: 1215 - protein, 302 aa, Uloborus diversus
GSQAGSQAGSQAGSQAGSQAGSQAGSQAGSQAGSQAASQAGSQSASQASASSSASAFASASAFAQSASFALSSSSSFASAVSSASSISALGTLGYQVGLQAAGSLGISNSQAFASSISQALTSVGVGASSSAYASAVSGVVAQYLSGTGVLTSANAQALASSFANVFAASAASASAAASASSATSAQSAAAALAQSQAAASAFSQAASQASSQASSQASSQAASQASSQASSQAGSQASSQAASQAASQAASQAASQAASQSAASARAGASSASFSASQSNAASQAGSQAASRAGSQAASQA

SEQ ID NO: 1216 - protein, 143 aa, Araneus ventricosus
GGAGSAGGYGEGAGAGVRSGAGASAGAAGGYGRATGAGAGGAAAAGASGYGGSYGAGAGAGAAGAGGASAYGAGIGGGYGAGAADAYGGGASAGAGAGAGAGVSGGYGRAAGAGAAAAAGANGYGGSYDAGVGAGTAGAGAGA

SEQ ID NO: 1217 - protein, 152 aa, Araneus ventricosus
GASGGYGGGAGEGAGAAAAAGAGAGGAGGYGGGAGSGAGAVARAGAGGAGGYGSGIGGGYGSGAGAAAGAGAGGAGAYGGGYGTGAGAGARGADSAGAAAGYGGGVGTGTGSSAGYGRGAGAGAGAGAAAGSGAGAAGGYGGGYGAGAGAGA

SEQ ID NO: 1218 - protein, 132 aa, Araneus ventricosus
GAGGATGNRAGDAFAQVFSQNVINSGVITSTTVTKNSAQAAASSMVSTAAKSLGLDENTARSMANAMSSYAAAMAKSFRNSDEFIRNMSYQMGRMLSNAGAINESTASAAASSASSTVTETVRTYGPAAIFS

SEQ ID NO: 1219 - protein, 180 aa, Araneus ventricosus
GAGAGGAGGYAQGYGAGAGAGAGAGTGAGGAGGYGQGYGAGSGAGAGGAGGYGAGAGAGAGAGGASGYGQGYGDGAGAGAGAAAAAGAAAGARGAGGYGGGAGDGAGAGAGAGAAGGYGQGYGAGEGAGAGAGAGGAGGYGAGAGAGGAGGYGQSYGDGAAAAAGSGAGAGGSGGYGAGA

SEQ ID NO: 1220 - protein, 182 aa, Araneus ventricosus
GAGAGAGAGSGAGAAGGYGGGAGAGVGAGGAGGYDQGYGAGAGAGSGAGAGGAGGYGGGAGAGADAGAGGAGGYGGGAGAGAGARAGAGGVGGYGQSYGAGAGAGAGVGAGGAGAGGADGYGQGYGAGAGTGAGDAGGYGGGAGAGASAGAGGYGGGAGAGGVGVYGKGYGSGSGAGAAAAA

SEQ ID NO: 1221 - protein, 132 aa, Araneus ventricosus; identical to SEQ ID NO: 1218

SEQ ID NO: 1222 - protein, 216 aa, Araneus ventricosus
GAGAGGAGGYAQGYGAGAGAGAGAGTGAGGAGGYGQGYGAGSGAGAGGAGGYGAGAGAGAGAGDASGYGQGYGDGAGAGAGAAAAAGAAAGARGAGGYGGGAGAGAGAGAGAAGGYGQGYGAGAGEGAGAGAGAGAVAGAGAAAAAGAGAGAGGAEGYGAGAGAGGAGGYGQSYGDGAAAAAGSGAGAGGSGGYGAGAGAGSGAGAAGGYGGGAGA

SEQ ID NO: 1223 - protein, 214 aa, Araneus ventricosus
GVGAGGEGGYDQGYGAGAGAGSGGGAGGAGGYGGGAGAGSGGGAGGAGGYGGGAGAGAGAGAGGAGGYGGGAGAGTGARAGAGGVGGYGQSYGAGASAAAGAGVGAGGAGAGGAGGYGQGYGAGAGIGAGDAGGYGGGAGAGASAGAGGYGGGAGAGAGGVGGYGKGYGAGSGAGAAAAAGAGAGSAGGYGRGDGAGAGGASGYGQGYGAGAAA

SEQ ID NO: 1224 - protein, 233 aa, Argiope argentata
GAGRGYGGGYGGGAAAGAGAGAGAGRGYGGGYGGGAGSGAGSGAGAGGGSGYGRGAGAGAGAGAAAAAGAGAGGAGGYGGGAGAGAGASAAAGAGAGAGGAGGYGGGYGGGAGAGAGAGAAAAAGAGAGAGAGRGYGGGFGGGAGSGAGAGAGAGGGSGYGRGAGGYGGGYGGGAGTGAGAAAATGAGAGAGAGRGYGGGYGGGAGAGAGAGAGAGGGSGYGRGAGAGASVAA

SEQ ID NO: 1225 - protein, 143 aa, Deinopis spinosa
GGQGDQGYRVQGGYGPVSNAAASAAAAASAGGGQGAGQGGYGPSSGAAAASAAGDSGGRGGRQGYVGGAGAGAGSGAGGQGGQGQYGPGTNGAAAAAAASAASAGGSGSQVSQDVDQGYGGGAGLGGSGSGSGAAAAAAAAAA

SEQ ID NO: 1226 - protein, 149 aa, Latrodectus hesperus
GGGYGRGQGAGAGVGAGAGAAAGAAAIARAGGYGQGAGGYGQGQGAGAAAGAAAGAGAGGYGQGAGGYGRGQGAGAGAGAGAGARGYGQGAGAGAAAGAAASAGAGGYGQGAGGYGQGQGAGAAAGAAASAGAGGYGQGAGGYGQGQGA

SEQ ID NO: 1227 - protein, 148 aa, Latrodectus hesperus
GAGAGAGAGAGGYGQGSGAGAAAGAAASAGAGGYGQGAGGYGRGQGASAGAGAGAGTGGYGQGAGAGAAAGAAASAGAGGYGQGAGGYGQGTGAGAGGYGQGTGAGAAAGAGASAGARGYGQRAGGYGQGQGAGAAAGAAAGAGRYGQ

SEQ ID NO: 1228 - protein, 200 aa, Metepeira grandiosa
GAGYGAGAGAGAGYGAGAGAGAGAGAVAAGGAGAGAGRGYGAGAGAGAGAAGGAGAGAGAGYGAGAGRGYGAGSGAGAGAGAAGGAGAGAGAGYGAGAGAGAGAASGAGAGAGYGAGAGRGYGAGAGAGSGAGAGAGAAGGAGAGYGAGAGAGAGSGAAAAGGAGAGAGYGAGAGRGYGAGAGAGSGAGAGAGEAGGAGA

SEQ ID NO: 1229 - protein, 212 aa, Metepeira grandiosa
GYGAGAGRGYGAGAGAGAGAVAASGAGAGAGYGAGAGAGAGAGYGAGAGRGYGAGAGAGAGSGAASGAGAGAGYGAGAGAGAGYGAGAGSGYGTGAGAGAGAAAAGGAGAGAGYGAGAGRGYGAGAGAGAASGAGAGAGAGAASGAGAGSGYGAGAAAAGGAGAGAGGGYGAGAGRGYGAGAGAGAGAGSGSGSAAGYGQGYGSGSGAGAAA

SEQ ID NO: 1230 - protein, 206 aa, Nephila antipodiana
GAAASGAGAGGAGGYGRGAGAGAGAGAGSAAGNAFAQSLSSNLLSSGDFVQMISSTTSTDQAVSVATSVAQNVGNQLGLDANAMNSLLGAVSGYVSTLGNAISDASAYANAISSAIGNVLANSGSISESTASSAASSAASSVTTTLTSYGPAVFYAPTSSAGGYGGLVGYGAGAGAAAGAGAGAGGAGGYIGQGGYGAGAGAAAAA

SEQ ID NO: 1231 - protein, 145 aa, Nephila clavipes
GGYGAGAGAVAAAGAAGAGGYGRGAGGYGGQGGYGAGAGAGAAAAAGAGAGGAGGYGRGAGAGAGAAAGAGAGAGGAGYGGQGGYGAGAGAGAAAAAGAGAGGAGGYGRGAGAGAGAAAGAGAGGYGGQGGYGAGAGAGAAAAAA

SEQ ID NO: 1232 - protein, 150 aa, Nephila clavipes
GAGSGGAGGYGRGAGAGAGAAAGAGAGAGSYGGQGGYGAGAGAGAAAAAGAGAGAGGYGRGAGAGAGAGAGAAARAGAGAGGAGYGGQGGYGAGAGAGAAAAAGAGAGGAGGYGRGAGAGAGAAAGAGAGAGGYGGQSGYGAGAGAAAAA

SEQ ID NO: 1233 - protein, 153 aa, Nephila clavipes
GAGAGGAGGYGRGAGAGAGAAAGAGAGAAAGAGAGGYGGQGGYGAGAGAGAAAAAGAGAGGAGGYGRGAGAGAGVAAGAGAGGYGGQGGYGAGAGAGAAAAAATGAGGAGGYGRGAGAGAGAAAGAGAGTGGAGYGGQGGYGAGAGAGAAAAA

SEQ ID NO: 1234 - protein, 161 aa, Nephila clavipes
GAGAGGAGYGRGAGAGAGAAAGAGAGAAAGAGAGAGGYGGQGGYGAGAGAGAAAAAGAGAGGAAGYSRGGRAGAAGAGAGAAAGAGAGAGGYGGQGGYGAGAGAGAAAAAGAGSGGAGGYGRGAGAGAAAGAGAAAGAGAGAGGYGGQGGYGAGAGAAAAA

SEQ ID NO: 1235 - protein, 179 aa, Nephilengys cruentata
GYGAGAGAGAGTGGAGGYGRGVGAGAGAGAGAGGAGGYGGGQNYGAGAGAAAAAGAGAGAGGAGGYGRGAGAGAGAAAGAGAGAAAGAGAGGAGGYGTGQGYGEGAGAGAGVGAGGAGGYGRGAGAGAGAGAGGYGAGQGYGAGAGAGAAAAAGAGAGAGGAGGYGRGAGAGAGAGAAA

SEQ ID NO: 1236 - protein, 164 aa, Nephilengys cruentata
GAGAGGAGGYGAGQGYGAGAGAGAAAGAGAGGARGYGARQGYGSGAGAGAGARAGGAGGYGRGAGAGAAAASGAGAGGYGAGQGYGAGAGAVASAAAGAGSGAGGAGGYGRGAGAVAGAGAGGAGGYGAGAGAAAGVGAGGSGGYGGRQGGYSAGAGAGAAAAA

SEQ ID NO: 1237 - protein, 182 aa, Nephilengys cruentata
GGAGGYGVGQGYGAGAGAGAAAGAGAGGAGGYGAGQGYGAGAGVGAAAAAGAGAGVGGAGGYGRGAGAGAGAGAGAAAGAGAGAAAGAGAGGAGGYGAGQGYGAGAGVGAAAAAGAGAGVGGAGGYGRGAGAGAGAGAGGAGGYGRGAGAGAGAGAGAGGAGGYGAGQGYGAGAGAGAAAAA

SEQ ID NO: 1238 - protein, 200 aa, Nephilengys cruentata
GAGAGAGGAGGYGRGAGAGAGAGAGAGGAGGYGAGQGYGAGAGAGAAAAAGAGAGAGGAGGYGRGAGAGAGAGAGAGGAGGYGAGQGYGAGAGAGAAAAAGAGAGAGGAGGYGRGAGAGAGAGAGAGGAGGYGRGAGAGAGAGAAAGAGAGGAGRYGAGQGYGAGAGAGAAAGAGAGGAGGYGAGQGYGAGAGAGAAAAA

SEQ ID NO: 1239 - protein, 186 aa, Nephilengys cruentata
GAGAGVGGAGGYGSGAGAGAGAGAGAASGAAAGAAAGAGAGGAGGYGTGQGYGAGAGAGAGAGAGGAGGYGRGAGAGAGAGAGGAGGYGAGQGYGAGAGAGAAAAAGDGAGAGGAGGYGRGAGAGAGAGAAAGAGAGGAGGYGAGQGYGAGAGAGAAAGAGAGGAGGYGAGQGYGAGAGAGAAAAA

SEQ ID NO: 1240 - protein, 182 aa, Nephilengys cruentata
GAGAGVGGAGGYGRGAGAGAGAAAGAGAGAAAGAGAGGAGGYGTGQGYGAGAGAGAGAGGAGGYGRGAGAGAGAGAGAGGAGEYGAGQGYGAGAGAGAAAAAGAGAGAGGAGGYGRGAGAGAGAGAAAGAGAGGAGGYGARQGYGAGAGAGAAAGAGAGGAGGYGAGQGYGAGAGAGAAAAA

SEQ ID NO: 1241 - protein, 160 aa, Nephilengys cruentata
GAGAGAGGAGGYGRGAGAGAGAGAGAAAGQGYGSGAGAGAGASAGGAGSYGRGAGAGAAAASGAGAGGYGAGQGYGAGAGAVASAAAGAGSGAGGAGGYGRGAVAGSGAGAGAGAGGAGGYGAGAGAGAAAGAVAGGSGGYGGRQGGYSAGAGAGAAAAA

SEQ ID NO: 1242 - protein, 192 aa, Nephilengys cruentata
GAGAGAGGAGGFGRGAGAGAGAGAGAAAGAGAGGAGGYGAGQGYGAGAGAGAAAAAGAGAGAGGAGGYGRGAGAGAGAGAAAAAGAGAGGAGGYGAGQGYGAGAGAGAAAAAGAGAGTGGAGGYGAGQGYGAGAGAGAGAGAGAGAGGAGGYGRGAGAGAGAGAGAGGAGGYGVGQGYGAGAGAGAGAGSAA

SEQ ID NO: 1243 - protein, 128 aa, Nephilengys cruentata
GNAFAQSLSSNLLSSGDFVQMISTTTSTDQAVSVATSVAQNVGNQLGLDANAMNNLLAAVGGYVSSLGGAVADAAAYANAISSAIGNVLANTGSINESTASSAASSAASSVTTTLTSYGPAVFYGRGA

SEQ ID NO: 1244 - protein, 145 aa, Parawixia bistriata
GAGAGGGYGGGYGAGGGAGAGAGAGAGAGAGAGAGRGGAGGYGAGAGAGAGAAAAAAAGAGAGGGYGGGYGAGVGAGAGAGAGAGGGYGGGYGAGAGAGAGAAAAAAAGAGAGGGYGGGYGAGGGAGAGAGAGAGAGAGAGAGRG

SEQ ID NO: 1245 - protein, 147 aa, Parawixia bistriata
GAVGYGAGAGAGAAAAAAAGAGAGGGYGGGYGAGGGAGAGAGAGAGGGYGGGYGAGGGAGAGAGAGAGAGRGGAGGYGAGAGAAAGAAAAAAAGAGAGGGYGGGYGAGGGAGAGAGAAAGAGAGAGRGGAGGYGAGAGAGAGAAAAA

SEQ ID NO: 1246 - protein, 132 aa, Uloborus diversus
GSGAGAGSGYGAGAGAGAGSGYGAGSSASAGSAINTQTVTSSTTTSSQSSAAATGAGYGTGAGTGASAGAAASGAGAGYGGQAGYGQGAGASARAAGSGYGAGAGAAAAAGSGYGAGAGAGAGSGYGAGAAA

SEQ ID NO: 1247 - protein, 174 aa, Uloborus diversus
GSGYGAGAGAGAGSGYGAGAGAGSGYGAGAGAGAGSGYVAGAGAGAGAGSGYGAGAGAGAGSSYSAGAGAGAGSGYGAGSSASAGSAVSTQTVSSSATTSSQSAAAATGAAYGTRASTGSGASAGAAASGAGAGYGGQAGYGQGGGAAAYRAGAGSQAAYGQGASGSSGAAAAA

SEQ ID NO: 1248 - protein, 168 aa, Uloborus diversus
GAGAGYGGQVGYGQGAGASAGAAAAGAGAGYGGQAGYGQGAGGSAGAAAAGAGAGRQAGYGQGAGASARAAAAGAGTGYGQGAGASAGAAAAGAGAGSQVGYGQGAGASSGAAAAAGAGAGYGGQVGYEQGAGASAGAEAAASSAGAGYGGQAGYGQGAGASAGAAAA

SEQ ID NO: 1249 - protein, 198 aa, Uloborus diversus
GAGAGYRGQAGYIQGAGASAGAAAAGAGVGYGGQAGYGQGAGASAGAAAAAGAGAGRQAGYGQGAGASAGAAAAGAGAGRQAGYGQGAGASAGAAAAGADAGYGGQAGYGQGAGASAGAAASGAGAGYGGQAGYGQGAGASAGAAAAGAGAGYLGQAGYGQGAGASAGAAAGAGAGYGGQAGYGQGTGAAASAAASSA

SEQ ID NO: 1250 - protein, 179 aa, Araneus ventricosus
GGPGGPGGPGGAYGPGAGGPSGPGGAGPGGVGPYGPGGVGPGGVGPGGAGVGPGGAPGAPGGPGGPGGPGGPGGVGGPLGAGAGGVGPGGAGAYGPGGAGAYGPGGVGLGGAGAYGPGGAGPGGAGPHGPGGPGGAGPGGEGPVTVDVEVSVGGAPGGGSGGVGPGGAGVGPGGAPGAP

SEQ ID NO: 1251 - protein, 268 aa, synthetic construct
  REGION 1..268: note = Description of Artificial Sequence: Synthetic polypeptide
GGAPGGGPGGAGPGGAGFGPGGGAGFGPGGGAGFGPGGAAGGPGGPGGPGGPGGAGGYGPGGAGGYGPGGVGPGGAGGYGPGGAGGYGPGGSGPGGAGPGGAGGEGPVTVDVDVTVGPEGVGGGPGGAGPGGAGFGPGGGAGFGPGGAPGAPGGPGGPGGPGGPGGPGGVGPGGAGGYGPGGAGGVGPAGTGGFGPGGAGGFGPGGAGGFGPGGAGGFGPGGAGGYGPGGVGPGGAGGFGPGGVGPGGSGPGGAGGEGPVTVDVDVSV

SEQ ID NO: 1252 - protein, 268 aa, Argiope trifasciata
GGAPGGGPGGAGPGGAGFGPGGGAGFGPGGGAGFGPGGAAGGPGGPGGPGGPGGAGGYGPGGAGGYGPGGVGPGGAGGYGPGGAGGYGPGGSGPGGAGPGGAGGEGPVTVDVDVTVGPEGVGGGPGGAGPGGAGFGPGGGAGFGPGGAPGAPGGPGGPGGPGGPGGPGGVGPGGAGGYGPGGAGGVGPAGTGGFGPGGAGGFGPGGAGGFGPGGAGGFGPAGAGGYGPGGVGPGGAGGFGPGGVGPGGSGPGGAGGEGPVTVDVDVSV

SEQ ID NO: 1253 - protein, 268 aa, Argiope trifasciata
GGAPGGGPGGAGPGGAGFGPGGGAGFGPGGGAGFGPGGAAGGPGGPGGPGGPGGAGGYGPGGAGGYGPGGVGPGGAGGYGPGGAGGYGPGGSGPGGAGPGGAGGEGPVTVDVDVTVGPEGVGGGPGGAGPGGAGFGPGGGAGFGPGGAPGAPGGPGGPGGPGGPGGPGGVGPGGAGGYGPGGAGGFGPGGTGGFGPGGAGGFGPGGAGGFGPGGAGGFGPGGAGGYGPGGVGPGGAGGFGPGGVGPGGSGPGGAGGEGPVTVDVDVSV

SEQ ID NO: 1254 - protein, 190 aa, Nephila clavipes
GVSYGPGGAGGPYGPGGPYGPGGEGPGGAGGPYGPGGVGPGGSGPGGYGPGGAGPGGYGPGGSGPGGYGPGGSGPGGYGPGGSGPGGYGPGGSGPGGYGPGGYGPGGSGPGGSGPGGSGPGGYGPGGTGPGGSGPGGYGPGGSGPGGSGPGGYGPGGSGPGGFGPGGSGPGGYGPGGSGPGGAGPGGVGP

SEQ ID NO: 1255 - protein, 230 aa, Nephila clavipes
GGFGPGGAGPGGAAPGGAGPGGAGPGGAGPGGAGPGGAGPGGAGPGGAGGAGGAGGSGGAGGSGGTTIIEDLDITIDGADGPITISEELPISGAGGSGPGGAGPGGVGPGGSGPGGVGPGGSGPGGVGPGGSGPGGVGPGGAGGPYGPGGSGPGGAGGAGGPGGAYGPGGSYGPGGSGGPGGAGGPYGPGGEGPGGAGGPYGPGGAGGPYGPGGAGGPYGPGGEGGPYGP

SEQ ID NO: 1256 - protein, 210 aa, Nephila clavipes
GGSYGPGGAGGPYGPGGPYGPGGEGPGGAGGPYGPGGVGPGGGGPGGYGPGGAGPGGYGPGGSGPGGYGPGGSGPGGYGPGGSGPGGYGPGGSGPGGYGPGGSGPGGSGPGGYGPGGSGPGGSGPGGYGPGGSGPGGYGPGGSGPGGSGPGGYGPGGSGPGGSGPGGYGPGGSGPGGFGPGGFGPGGSGPGGYGPGGSGPGGAGPGGVGP

SEQ ID NO: 1257 - protein, 233 aa, Nephila clavipes
GGFGPGGAGPGGAGPGGAGPGGAGPGGAGPGGAGPGGAGPGGAGPGGAGGAGGAGGAGGSGGAGGSGGTTIIEDLDITIDGADGPITISEELTISGAGGSGPGGAGPGGVGPGGSGPGGVGPGGSGPGGVGPGGSGPGGVGPGGAGGPYGPGGSGPGGAGGAGGPGGAYGPGGSYGPGGSGGPGGAGGPYGPGGEGPGGAGGPYGPGGAGGPYGPGGAGGPYGPGGEGGPYGP

SEQ ID NO: 1258 - protein, 180 aa, Nephila clavipes
GGSYGPGGAGGPYGPGGPYGPGGEGPGGAGGPYGPGGVGPGGGGPGGYGPGGAGPGGYGPGGSGPGGYGPGGSGPGGYGPGGSGPGGYGPGGSGPGGYGPGGSGPGGSGPGGYGPGGSGPGGYGPGGSGPGGSGPGGYGPGGSGPGGFGPGGFGPGGSGPGGYGPGGSGPGGAGPGGVGP

SEQ ID NO: 1259 - protein, 233 aa, Nephila clavipes
GGFGPGGAGPGGAGPGGAGPGGAGPGGAGPGGAGPGGAGPGGAGPGGAGGAGGAGGAGGSGGAGGSGGTTIIEDLDITIDGADGPITISEELTISGAGGSGPGGAGPGGVGPGGSGPGGVGPGGSGPGGVGPGGSGAGGVGPGGAGGPYGPGGSGPGGAGGAGGPGGAYGPGGSYGPGGSGGPGGAGGPYGPGGEGPGGAGGPYGPGGAGGPYGPGGAGGPYGPGGEGGPYGP

SEQ ID NO: 1260 - protein, 285 aa, Nephilengys cruentata
GAGGSGPGGAGPGGAGPGGAGPGGAGPGGAGPGGVGPGGAGGPGGAGGPFGPGGSGPGGAGGAGGPYGPGGAYGPGGPGGPGGPGGPGSGGPYGPGGAYGPGGAYGPGGAYGPGGAGGPGGAGGPYGPGGPYGPGGPYGPGGAGGPGGAGGPYGPGGAGPGGYGPGGAGPGGYGPGGSGPGGAGPGGYGPGGSGPGGAGPGGYGPGGAGPGGYGPGGAGPGGAGPGGAGPGGYGPGGSGPGGPGSGGPGGAGGSGGTTVIEDLDITVNGPGGPITISEELTVGGP

SEQ ID NO: 1261 - protein, 269 aa, Nephilengys cruentata
GAGGSGPGGAGPGGAGPGGAGPGGVGPGGAGGPGGAGGPFGPGGSGPGGAGGAGGPYGPGGAYGPGGPGGPGGPGGPGSGGPYGPGGAYGPGGAYGPGGAYGPGGAGGPYGPGGPYGPGGPYGPGGAGGPGGAGGPYGPGGAGPGGYGPGGAGPGGYGPGGSGPGGAGPGGYGPGGSGPGGAGPGGYGPGGAGPGGYGPGGAGPGGAGPGGAGPGGYGPGGSGPGGPGSGGPGGAGGSGGTTVIEDLDITVNGPGGPITISEELTVGGP

SEQ ID NO: 1262 - protein, 288 aa, Nephilengys cruentata
GAGGSGPGGAGPGGAGPGGAGPGGAGPGGAGPGGVGPGGAGGPGGAGGPFGPGGSGPGGAGGAGGPYGPGGAYGPGGPGGPGGPGGPGGPGSGGPYGPGGAYGPGGAYGPGGAYGPGGAGGPGGAAGPYGPGGPYGPGGPYGPGGAGGPGGAGGPYGPGGAGPGGYGPGGAGPGGYGPGGSGPGGAGPGGYGPGGSGPGGAGPGGYGPGGAGPGGYGPGGAGPGGAGPGGAGPGGYGPGGSGPGGPGSGGPGGAGGSGGTTVIEDLDITLNGPGGPITISEELTVGGP

SEQ ID NO: 1263 - protein, 177 aa, Nephila madagascariensis
GAGGSGPGGAGPGGVGPGRSGPGGVGPGGSGPGSVGPGGSGQGGLGIGRSGPGGVGPGGSGPGSIGPGGSGQGGLGPGGSGQGGLGPGGSGPGGVGSGGVGGPYGPGGSGPGGVGGAGGPYGPGGSGGPGGAGGPYGPGGPYGPGGAGGPYGPGGAGGPYGPGGPYGPGGAGGPGGG

SEQ ID NO: 1264 - protein, 191 aa, Nephila madagascariensis
GPGGAGGPYGPGGPGGAGPGGYGPGGYGPGGAGPGGAGPGGYGPGGAGPGGYGPGGAGPGGSGPGGIGPGGSGPGGYGPGGIGPGGTGPGGAGPGGAGPGGAGPSGAGPGGAGPSGAGRGGSGRGSVGRGGAGRGGAGRGGAGGAGGSGGAGGSGGAGGSGGTTIIEDLDITVDGANGPITISEELTIGGA

SEQ ID NO: 1265 - protein, 195 aa, Nephila madagascariensis
GAGGVGPGGSGPGGVGPGGSGPGGVGPGGSGPGGVGSGGSGPGGVGPGGSGPGGVGSGGFGPGGIGPGGSGPGGVGPGGVGGPYGPGGSGPGGAGGAGGSYGPGGPYGPGGSGGPGGAGGPYGPGGAGGPYGPGGPYGPGGAGGPGGEGPGGAGGPYGPGGPGGAGPGGYGPGGAGPGGYGPGGAGPGGYGPGGA

SEQ ID NO: 1266 - protein, 216 aa, Nephila madagascariensis
GSGGYGPGGAGPGGYGPGGPGPGGYGPGGAGPGGYGPGGTGPGGSAPGGAGPGGAGPGGYGPGGSGPGGYGPGGGPGGAGPGGAGPGGAGPGGAGPGGAGPGGAGPGGAGPGGAGPGGAGPGGAGPGGVGTGGLGRGGAGRGGAGRGGAGRGGAGRGGAGRGGTGGVGGAGGAGGAGGVGGAGGSGGTTVIEDLDITIDGADGPITISEELTISGA

SEQ ID NO: 1267 - protein, 198 aa, Nephila madagascariensis
GAGGSGPGGAGPGGVGPGGSGPGGVGPGGSGPGGVGPGGAGGPYRPGGSGPGGAGGAGGPGGAYGPGGSGGPGGAGGPYGPGGEGPGGSGGPYGPGGEGPGGAGGPYGPGGAGGPYGPGGAGGPYGPGGAGGPYGPGGAGGPYGPGGAGGPYGPGGAGGPYGPGGEGPGGAGGPYGPGGVGPGGTGPGGYGPGGAGPG

SEQ ID NO: 1268 - protein, 208 aa, Nephila madagascariensis
GYGPGGSGPGGYGPGGSGPGGFGPGGSGPGGYGPGGSGPGGYGPGGSGPGGAGPGGYGPGGTGPGGSGPGGYGPGGSGPGGYGPGGSGPGGYGPGGSGPGGAGPGGAGPGGAGPGGAGPGGVGPGGAGPGGSGPGGAGPGGAGRGGAGRGGAGPGGAGPGGAGGAGGAGGSGGAGGSGGTTVIEDLDITIDGADGPITISEELTINGA

SEQ ID NO: 1269 - protein, 183 aa, Nephila madagascariensis
GAGGSGPGGAGPGGVGPGGSGPGGVGPGGSGPGGVGPGGAGGPYGPGGSGPGGAGGAGGPGGAYGPGGSGGPGGAGGPYGPGGEGPGGAGGPYGPGGEGPGGAGGPYGPGGAGGPYGPGGAGGPYGPGGAGGPYGPGGAGGPYGPGGVGPGGTGPGGYGPGGAGPGGYGPGGSGPGGYGPGGS

SEQ ID NO: 1270 - protein, 201 aa, Nephila madagascariensis
GPGGYGPGGSGPGGFGPGGSGPGGSGPGGSGPGGYGPGGSGPGGYGPGGSGPGGYGPGGSGPGGYGPGGSGPGGSGPGGYGPGGSGPGGYGPGGSGPGGAGPGGAGPGGVGPGGAGPGGAGPGGVGPGGAGPGGAGPGGAGPGGAGRGGAGPGGAGGAGGAGGSGGAGGSGGTTVIEDLDITIDGADGPITISEELTIGGA

SEQ ID NO: 1271 - protein, 208 aa, Latrodectus hesperus
GINVDSDIGSVTSLILSGSTLQMTIPAGGDDLSGGYPGGFPAGAQPSGGAPVDFGGPSAGGDVAAKLARSLASTLASSGVFRAAFNSRVSTPVAVQFTDALVQKIASNLGLDYATASKLRKASQAVSKVRMGSDTNAYALAISSALAEVLSSSGKVADANINQIAPQLASGIVLGVSTTAPQFGVDLSSINVNLDISNVARNMQASIQ

SEQ ID NO: 1272 - protein, 168 aa, Latrodectus hesperus
GGPAPITAEGPDFGAGYPGGAPTDLSGLDMGAPSDGSRGGDATAKLLQALVPALLKSDVFRAIYKRGTRKQVVQYVTNSALQQAASSLGLDASTISQLQTKATQALSSVSADSDSTAYAKAFGLAIAQVLGTSGQVNDANVNQIGAKLATGILRGSSAVAPRLGIDLS

SEQ ID NO: 1273 - protein, 208 aa, Latrodectus hesperus
GINVDSDIGSVTSLILSGSTLQMTIPAGGDDLSGGYPGGFPAGAQPSGGAPVDFGGPSAGGDVAAKLARSLASTLASSGVFRAAFNSRVSTPVAVQLTDALVQKIASNLGLDYATASKLRKASQAVSKVRMGSDTNAYALAISSALAEVLSSSGKVADANINQIAPQLASGIVLGVSTTAPQFGVDLSSINVNLDISNVARNMQASIQ

SEQ ID NO: 1274 - protein, 168 aa, Latrodectus hesperus; identical to SEQ ID NO: 1272

SEQ ID NO: 1275 - protein, 208 aa, Latrodectus hesperus
GINVDSDIGSVTSLILSGSTLQMTIPAGGDDLSGGYPGGLPSGAQPSGGAPVDFGGPSAGGDVAAKLARSLASTLASSGVFRAAFNSRVSTPVAVQLTDALVQKIASNLGLDYATASKLRKASQAVSKVRMGSDTNAYALAISSALAEVLSSSGKVADANINQIAPQLASGIVLGVSTTAPQFGVDLSSINVNLDISNVARNMQASIQ

SEQ ID NO: 1276 - protein, 168 aa, Latrodectus hesperus; identical to SEQ ID NO: 1272

SEQ ID NO: 1277 - protein, 208 aa, Latrodectus hesperus; identical to SEQ ID NO: 1273

SEQ ID NO: 1278 - protein, 168 aa, Latrodectus hesperus; identical to SEQ ID NO: 1272

SEQ ID NO: 1279 - protein, 208 aa, Latrodectus hesperus
GINVDSDIGSVTSLILSGSTLQMTIPAGGDDLSGGYPGGFPSGAQPSGGAPVDFGGPSAGGDVAAKLARSLASTLASSGVFRAAFNSRVSTPVAVQLTDALVQKIASNLGLDYATASKLRKASQAVSKVRMGSDTNAYALAISSALAEVLLSSGKVADANINQIAPQLASGIVLGVSTAAPQFGVDLSSINVNLDISNVARNMQASIQ

SEQ ID NO: 1280 - protein, 168 aa, Latrodectus hesperus; identical to SEQ ID NO: 1272

SEQ ID NO: 1281 - protein, 215 aa, Argiope amoena
GSSAGLVSRVANALANTSTLRAVLRRGVSQQTASSVVQRAVQSLAGTLGVDGNSLSRIALQAISQLPGGSDTSAYAQAFSSALFNAGVLNASNIDTLGSRVLSAVLNGVSSAAQGIGLNVDTGSVQSDISSSSSFLSSSSSSASFSQTSASSTSGAGYTAPAGPSGYTGPSGPSGYTGPVGGAAQFGSVSGQTSFGQTSGFTASTGGQAAFGATS

SEQ ID NO: 1282 - protein, 215 aa, Argiope amoena
GSSAGLVSRVANALANTSTLRAVLRRGVSQQTASSVVQRAVQSLAGTLGVDGNSLSRIALQAISQLPAGSDTSAYAQAFSSALVNAGVLNASNIDTLGSRVLSAVLNGVSSAAQGIGLNVDTGSVQSDISSSSSFLSSSSSSASFSQTSASSTSGAGYTGPSGPSGYTGPAGPSGYTGPVGGAAQFGSVSGQTSFGQTSGFTASTGGQAAFGATS

SEQ ID NO: 1283 - protein, 215 aa, Argiope amoena
GSSAGLVSRVANALANTSTLRAVLRRGVSPQTASSVVQRAVQSLAGTLGVDGNSLSRIALQAISQLPAGSDTSAYAQAFSSALVNAGVLSASNIDTLGSRVLSAVLNGVSSAAQGIGLNVDTGSVQSDISSSSSFLSSSSSSSSISQTSASSTSGAGYTGPAGPSGYTGPSGPSGYTGPVGGAAQFGSVSGQTSFGQTSGFTASTGGQAAFGATS

SEQ ID NO: 1284 - protein, 215 aa, Argiope amoena
GSSAGLVSRVANALANTSTLRAVLRRGVSQQTASSVVQRAVQSLAGTLGVDGNSLSRIALQAISQLPAGSDTSAYAQAFSSALVNAGVLNASNIDTLGSRVLSAVLNGVSSAAQGIGLNVDSGSIQSDISSSSSFLSSSSSSSSISQTSASSTSGAGYTGPAGPSGYTGPSGPSGYTGPVGGAAQFGSVSGQTSFGQTSGFTASTGGQAAFGATS

SEQ ID NO: 1285 - protein, 203 aa, Araneus ventricosus
GGGVGSLTGQTSFGQTSGFTSTAGAQGGFGPTTGAQSALISRIANALANTSTLRSVLRTGVSQQTASSVVQRTIQTLASNLGIDGNNLSRIALQAISQVPAGSDTSAYAQAFSTALVTGGVLNANNVDTLGSQVLSAVLNGVSSAAQGLGINVDTGSVQSDIRSSSSSLSTSSSSASFSQTSGAASTTGFTGAGGYPGGAGPL

SEQ ID NO: 1286 - protein, 203 aa, Araneus ventricosus
GGGVGSLTGQTSFGQTSGFTSTAGAQGGFGPTTGAQSALISRIANALANTSTLRSVLRTGVSQQTASSVVQRAIQTLASNLGIDGNNLSRIALQAISQVPAGSDTSAYAQAFSTALVTGGVLNANNVDTLGSQVLSAVLNGVSSAAQGLGINVDTGSVQSDIRSSSSSLSTSSSSASFSQTSGAASTTGFTGAGGYPGGAGPL

SEQ ID NO: 1287 - protein, 203 aa, Araneus ventricosus; identical to SEQ ID NO: 1285

SEQ ID NO: 1288 - protein, 203 aa, Araneus ventricosus
GGGVGSLTGQTSFGQTSGFTSTAGAQGGFGPTTGAQSALISRIANALANTSTLRSVLRTGVSQQTASSVVQRAIQTLASNLGLDGNNLSRIALQAISQVPAGFDASAYAQAFSTALVTGGVLNANNVDTLGSQVLSAVLNGVSSAAQGLGINVDTGSVQSDIRSSSSSLSTSSSSASFSQTSGAASTTGFTGAGGYPGGAGPL

SEQ ID NO: 1289 - protein, 203 aa, Araneus ventricosus
GGGVGSLTGQTSFGQTSGFTSTAGAQGGFGPTTGAQSALISRIANALANTSTLRSVLRTGVSQQTASSVVQRTIQTLASNLGIDGNNLSRIALQAISQVPAGSDTSAYAQAFSTALVTGGVLNANNVDTLGSQVLSAVLSGVSSAAQGLGINVDTGSVQSDIRSSSSSLSTSSSSASFSQTSGAASTTGFTGAGGYPGGAGPL

SEQ ID NO: 1290 - protein, 203 aa, Araneus ventricosus
GGGVGSLTGHTSFGQTSGFTSTAGAQGGFGPTTGAQSALISRIANALANTSTLRSVLRTGVSQQIASSVVQRTIQTLASNLGIDGNNLSRIALQAISQVPAGSDTSAYAQAFSTALVTGGVLNANNVDTLGSQVLSAVLNGVSSAAQGLGINVDTGSVQSDIRSSSSSLSTSSSSASFSQTSGAASTTGFTGAGGYPGGAGPL

SEQ ID NO: 1291 - protein, 203 aa, Araneus ventricosus
GGGVGSLTGQTSFGQTSGFTSTAGAQGGFGPITGAQSALISRIANALANTSTLRSVLRTGVSQQTASSVVQRTIQTLASNLGIDGNNLSRIALQAISQVPAGSDTSAYAQAFSTALVTGGVLNANNVDTLGSQVLSAVLNGVSSAAQGLGINVDTGSVQSDIRSSSSSLSTSSSSASFSQTSGAASTTGFTGAGGYPGGAGPL

SEQ ID NO: 1292 - protein, 203 aa, Araneus ventricosus; identical to SEQ ID NO: 1285

SEQ ID NO: 1293 - protein, 200 aa, Argiope trifasciata
GAGYTGPSGPSTGPSGYPGPLGGGAPFGQSGFGGSDGPQGGFGATGGASAGLISRVANALANTSTLRTVLRTGVSQQIASSVVQRAAQSLASTLGVDGNNLARFAVQAVSRLPAGSDTSAYAQAFSSALFNAGVLNASNIDTLGSRVLSALLNGVSSAAQGLGINVDSGSVQSDISSSSSFLSTSSSSASYSQASASSTS

SEQ ID NO: 1294 - protein, 200 aa, Argiope trifasciata
GAGYTGPSGPSTGPSGYPGLLGGGAPFGQSGFGGSDGPQGGFGATGGASAGLISRVANALANTSTLRTVLRTGVSQQIASSVVQRAAQSLASTLGVDGNNLARFAVQAVSRLPAGSDTSAYAQAFSSALFNAGVLNASNIDTLGSRVLSALLNGVSSAAQGLGINVDSGSVQSDISSSSSFLSTSSSSASYSQASASSTS

SEQ ID NO: 1295 - protein, 200 aa, Argiope trifasciata; identical to SEQ ID NO: 1293

SEQ ID NO: 1296 - protein, 200 aa, Argiope trifasciata
GAGYTGPSGPSTGPSGYPGPLGGGAPFGQSGFGGSAGPQGGFGATGGASAGLISRVANALANTSTLRTVLRTGVSQQIASSVVQRAAQSLASTLGVDGNNLARFAVQAVSRLPAGSDTSAYAQAFSSALFNAGVLNASNIDTLGSRVLSALLNGVSSAAQGLGINVDSGSVQSDISSSSSFLSTSSSSASYSQASASSTS

SEQ ID NO: 1297 - protein, 200 aa, Argiope trifasciata; identical to SEQ ID NO: 1296

SEQ ID NO: 1298 - protein, 200 aa, Argiope trifasciata
GTGYTGPSGPSTGPSGYPGPLGGGAPFGQSGFGGSAGPQGGFGATGGASAGLISRVANALANTSTLRTVLRTGVSQQIASSVVQRAAQSLASTLGVDGNNLARFAVQAVSRLPAGSDTSAYAQAFSSALFNAGVLNASNIDTLGSRVLSALLNGVSSAAQGLGINVDSGSVQSDISSSSSFLSTSSSSASYSQASASSTS

SEQ ID NO: 1299 - protein, 200 aa, Argiope trifasciata; identical to SEQ ID NO: 1296

SEQ ID NO: 1300 - protein, 200 aa, Argiope trifasciata; identical to SEQ ID NO: 1293

SEQ ID NO: 1301 - protein, 189 aa, Parawixia bistriata
GFTGASYPGPQVSQPAPFGVGPQPGGALPGFGQVSGAQSALISRIANALGNTATMRAVLRSGVSQQIVSNVVQGAVQALSSSLGIDGNNLARIASQTILRVPAGSDTSAYAQAFSTALFNSGVLNASNVNTLGSQVVSTLLRGISSTAQGLGLNVDAGSVQSDISSSSSFLSTSSSSTSSSQTTAASTS

SEQ ID NO: 1302 - protein, 189 aa, Parawixia bistriata
GFTGASYPGPQVSQPAPFGVGPQPGGALPGFGQVSGAQSALISRIANALGNTATMRAVLRSGVSQQIVSNVVQGAVQALSSSLGIDGNNLARIASQTILRVPAGSDTSAYAQAFSTALFNSGVLNASNVNTLGSQVVSTLLRGISNTAQGLGLNVDAGSVQSDISSSSSFLSTSSSSTSSSQTTAASTS

SEQ ID NO: 1303 - protein, 177 aa, Uloborus diversus
GASAADIATAIAASVATSLQSNGVLTASNVSQLSNQLASYVSSGLSSTASSLGIQLGASLGAGFGASAGLSASTDISSSVEATSASTLSSSASSTSVVSSINAQLVPALAQTAVLNAAFSNINTQNAIRIAELLTQQVGRQYGLSGSDVATASSQIRSALYSVQQGSASSAYVSAIV

SEQ ID NO: 1304 - protein, 180 aa, Uloborus diversus
GPLITALSSRGVVNASNSSQIASSLATAILQFTANVAPQFGISIPTSAVQSDLSTISQSLTAISSQTSSSVDSSTSAFGGISGPSGPSPYGPQPSGPTFGPGPSLSGLTGFTATFASSFKSTLASSTQFQLIAQSNLDVQTRSSLISKVLINALSSLGISASVASSIAASSSQSLLSVSA

SEQ ID NO: 1305 - protein, 177 aa, Uloborus diversus; identical to SEQ ID NO: 1303

SEQ ID NO: 1306 - protein, 180 aa, Uloborus diversus; identical to SEQ ID NO: 1304

SEQ ID NO: 1307 - protein, 171 aa, Agelenopsis aperta
GPGYGYAAYYAANYGYGPGVGAGSGAGAGSGSGVGAGSGFGAGAGSGTGLGRGAGTGAGAGSGAGSGAGAGSGSGAGAGSGSGAGAGRGAGLGGFGSGLGAGAGTGAGAGSGSGAGSGAGAGAGSGFGAGAGRGAGSGGTGSWLRSGVGTGSSASAGSAGSGAGVGSGAGP

SEQ ID NO: 1308 - protein, 169 aa, Agelenopsis aperta
GPAYGYAAYYAANYGYGPGVGAGSGAGAGSGSGAGAGSGSGAGAGSGAGLGRGAGTGAGAGSGAGSGAGAGSGSGAGAGSGSGAGAGRGAGLGGLGSGLGAGAGTGAGSGSGSGAGSGAGAGAGSGSGAGAGRGAGSGLGAGLGSGVGTGSGAGAGAGSGAGVGSGAGA

SEQ ID NO: 1309 - protein, 164 aa, Agelenopsis aperta
GPGYGYAAYYAANYGYGPGVGAGSGAGAGSGSGAGAGSGSGAGAGSGAGLGRGAGTGAGAGSGAGSGAGAGSGSGAGAGSGSGAGAGRGAGLGGLGAGLGAGAGSGAGAGSGAGAGAGSGSGAGAGRGAGLGGLGAGLGSGVGTGAGAGAGAGSGAGAGSGAGA

SEQ ID NO: 1310 - protein, 168 aa, Agelenopsis aperta
GPGYGYAAYYAANYGYGPGVGAGSGAGAGSGSGSGAGAGSGSGAAAGSGAGLGRGAGTGAGAGSGAGSGAGSGAGAGSGSGAGAGRGAGLGRLGSGLGAGSGTGAGAGSGSGAGSGAGAGAGSGSGAGAGLGAGLGGLGAGLVSGVGTGAGAGAGAGSGAGAGSGAGA

SEQ ID NO: 1311 - protein, 168 aa, Aphonopelma seemanni
GKAISSGAASAAASASAASAAATAVAAASFSASTTTTATSTSAAATGAAAAAGGEAAAVSSTASSSFLQALVSSILERPEFLVPLSHATSASSAYAITSTIVRDAAYETEFSKWATQMSSAAAKEVAEVGSGASAYDYAYAMARGLTKCLSRYNLINSQDPTPSARKL

SEQ ID NO: 1312 - protein, 190 aa, Araneus ventricosus
GGQGGQGGYGGLGSQGAGQGGYGAGQGAAAAAAAAGGAGGAGRGGLGAGGAGQGYGAGLGGQGGAGQAAAAAAAGGAGGARQGGLGAGGAGQGYGAGLGGQGGAGQGGAAAAAAAAGGQGGQGGYGGLGSQGAGQGGYGAGQGGAAAAAAAAGGQGGQGGYGGLGSQGAGQGGYGGRQGGAGAAAAAAAA

SEQ ID NO: 1313 - protein, 218 aa, Argiope aurantia
GGYGPGAGQQGPGGAGQQGPGSQGPGGAGQQGPGGQGPYGPGAAAAAAAVGGYGPGAGQQGPGSQGPGSGGQQGPGGQGPYGPSAAAAAAAAGGYGPGAGQQGPGSQGPGSGGQQGPGGLGPYGPSAAAAAAAAGGYGPGAGQQGPGSQGPGSGGQQRPGGLGPYGPSAAAAAAAAGGYGPGAGQQGPGSQGPGSGGQQRPGGLGPYGPSAAAAAAAA

SEQ ID NO: 1314 - protein, 278 aa, Argiope bruennichi
GSAPQGAGGPAPQGPSQQGPVSQGPYGPGAAAAAAAAGGYGPGAGQQGPGSQGPGSGGQQGPGSQGPGSGGQQGPGGQGPYGPSAAAAAAAAAGGYGPGAGQQGPGSQGPGSGGQQGPGGQGPYGPGAAAAAAAVGGYGPGAGQQGPGSQGPGSGGQQGPGGQGPYGPSAAAAAAAAGGYGPGAGQQGPGSQGPGSGGQQGPGGQGPYGPSAAAAAAAAGGYGPGAGQQGPGSGGQQGPGGQGPYGSGQQGPGGAGQQGPGGQGPYGPGAAAAAAAAA

SEQ ID NO: 1315 - protein, 251 aa, Argiope bruennichi
GGYGPGAGQQGPGGAGQQGPGSQGPGGQGPYGPGAGQQGPGSQGPGSGGQQGPGGQGPYGPSAAAAAAAAGGYGPGAGQQGPGSQGPGSGGQQGPGSQGPGSGGQQGPGGQGPYGPSAAAAAAAAGGYGPGAGQQGPGSQGPGSGGQQGPGGQGPYGPGAAAAAAAVGGYGPGAGQQGPGSQGPGSGGQQGPGGQGPYGPSAAAAAAAAGGYGPGAGQQGPGSQGPGSGGQQGPGGQGPYGPSAAAAAAAA

SEQ ID NO: 1316 - protein, 228 aa, Argiope bruennichi
GGYGPGAGQQGPGSGGQQGPGGQGPYGSGQQGPGGAGQQGPGGQGPYGPGAAAAAAAAAGGYGPGAGQQGPGGAGQQGPGSQGPGGQGPYGPGAGQQGPGSQGPGSGGQQGPGGQGPYGPSAAAAAAAAAGGYGPGAGQRSQGPGGQGPYGPGAGQQGPGSQGPGSGGQQGPGGQGPYGPSAAAAAAAAGPGAGRQGPGSQGPGSGGQQGPGGQGPYGPSAAAAAAAA

SEQ ID NO: 1317 - protein, 257 aa, Argiope bruennichi
GPGARRQGPGSQGPGSGGQQGPGGQGPYGSGQQGPGGAGQQGPGGQGPYGPGAAAAAAAAAGGYGPGAGQQGPGGAGQQGPGSQGPGGQGPYGPGAGQQGPGSQGPGSGGQQGPGGQGPYGPSAAAAAAAAGGYGPGAGQQGPGSQGPGSGGQQGPGGQGPYGPGAAAAAAAVGGYGPGAGQQGPGSQGPGSGGQQGPGGQGPYGPSAAAAAAAAGGYGPGAGQQGPGSQGPGSGGQQGPGGQGPYGPSAAAAAAAA

SEQ ID NO: 1318 - protein, 255 aa, Argiope bruennichi
GGYGPGAGQQGPGSGGQQGPGGQGPYGSGQQGPGGAGQQGPGGQGPYGPGAAAAAAAAAGGYGPGAGQQGPGGAGQQGPEGPGSQGPGSGGQQGPGGQGPYGPGAAAAAAAVGGYGPGAGQQGPGSQGPGSGGQQGPGGQGPYGPSAAAAAAAAGGYGPGAGQQGPGSQGPGSGGQQGPGGQGPYGPSAAAAAAAAGGYGPGAGQQGPGSGGQQGPGGQGPYGSGQQGPGGAGQQGPGGQGPYGPGAAAAAAAAA

SEQ ID NO: 1319 - protein, 252 aa, Argiope bruennichi
GGYGPGAGQQGPGGAGQQGPGSQGPGGQGPYGPGAGQQGPGSQGPGSGGQQGPGGQGPYGPSAAAAAAAAGGYGPGAGQQGPGSQGPGSGGQQGPGSQGPGSGGQQGPGGQGPYGPSAAAAAAAAAGGYGPGAGQQGPGSQGPGSGGQQGPGGQGPYGPGAAAAAAAVGGYGPGAGQQGPGSQGPGSGGQQGPGGQGPYGPSAAAAAAAAGGYGPGAGQQGPGSQGPGSGGQQGPGGQGPYGPSAAAAAAAA

SEQ ID NO: 1320 - protein, 261 aa, Argiope bruennichi
GGYGPGAGQQGPGSGGQQGPGGQGPYGSGQQGPGGAGQQGPGGQGPYGPGAAAAAAAAAGGYGPGAGQQGPGGAGQQGPGSQGPGGQGPYGPGAGQQGPGSQGPGSGGQQGPGGQGPYGPSAAAAAAAAGGYGPGAGQQGPGSQGPGSGGQQGPGGQGPYGPSAAAAAAAAGGYGPGAGQQGPGSGGQQGPGGQGPYGSGQQGPGGAGQQGPGGQGPYGGGYGPGAGQQGPGSQGPGSGGQQGPGGQGPYGPSAAAAAAAA

SEQ ID NO: 1321 - protein, 258 aa, Argiope bruennichi
GPGARRQGPGSQGPGSGGQQGPGGQGPYGSGQQGPGGAGQQGPGGQGPYGPGAAAAAAAAAGGYGPGAGQQGPGGAGQQGPGSQGPGGQGPYGPGAGQQGPGSQGPGSGGQQGPGGQGPYGPSAAAAAAAAAGGYGPGAGQQGPGSQGPGSGGQQGPGGQGPYGPGAAAAAAAVGGYGPGAGQQGPGSQGPGSGGQQGPGGQGPYGPSAAAAAAAAGGYGPGAGQQGPGSQGPGSGGQQGPGGQGPYGPSAAAAAAAA

SEQ ID NO: 1322 - protein, 244 aa, Argiope bruennichi
GGQGGRGGFGGLGSQGEGGAGQGGAGAAAAAAAAGADGGFGLGGYGAGRGYGAGLGGAGGAGAASAAAAAGGQGGRSGFGGLGSQGAGGAGQGGAGAAAAAAAAGADGGSGLGGYGAGRGYGASLGGADGAGAASAAAAAGGQGGRGGFGGLGSQGAGGAGQGGAGAAAAAAAASGDGGSGLGGYGAGRGYGAGLGGAGGAGAASAAAAAGGEGGRGGFGGLGSQGAGGAGQGGSLAAAAAAAA

SEQ ID NO: 1323 - protein, 241 aa, Argiope bruennichi
GADGGSGLGGYGAGRGYGAGLGGADGAGAASAAAAAGGQGGRGGFGRLGSQGAGGAGQGGAGAAAAVAAAGGDGGSGLGGYGAGRGYGAGLGGAGGAGAASAAAAAGGQGGRGGFGGLGSQGAGGAGQGGAGAAASGDGGSGLGGYGAGRGYGAGLGGADGAGAASAASAAGGQGGRGGFGGLGSQGAGGAGQGGAGAAAAAATAGGDGGSGLGGYGAGRGYGAGLGGAGGAGAASAAAAA

SEQ ID NO: 1324 - protein, 280 aa, Argiope bruennichi
GGQGGRGGFGGLGSQGAGGAGQGGAGAAAAAAAAGGDGGSGLGGYGAGRGHGVGLGGAGGAGAASAAAAAGGQGGRGGFGGLGSQGAGGAGQGGAGAAAAAAAAGGDGGSGLGGYGAGRGHGAGLGGAGGAGAASAAAAAGGQGGRGGFGGLGSQGSGGAGQGGSGAAAAAAAAGGDGGSGLGGYGAGRGYGAGLGGAGGAGAASAAAAAGGQGGRGGFGGLGSQGAGGAGQGGSGAAAAAAAAVADGGSGLGGYGAGRGYGAGLGGAGGAGAASAAAAT

SEQ ID NO: 1325 - protein, 231 aa, Argiope trifasciata
GGQGGQGGYDGLGSQGAGQGGYGQGGAAAAAAAASGAGSAQRGGLGAGGAGQGYGAGSGGQGGAGQGGAAAATAAAAGGQGGQGGYGGLGSQGSGQGGYGQGGAAAAAAAASGDGGAGQEGLGAGGAGQGYGAGLGGQGGAGQGGAAAAAAAAAGGQGGQGGYGGLGSQGAGQGGYGQGGAAAAAAAASGAGGAGQGGLGAAGAGQGYGAGSGGQGGAGQGGAAAAAAAAA

SEQ ID NO: 1326 - protein, 231 aa, Argiope trifasciata
GGQGGQGGYGGLGSQGAGQGGYGQGGVAAAAAAASGAGGAGRGGLGAGGAGQEYGAVSGGQGGAGQGGEAAAAAAAAGGQGGQGGYGGLGSQGAGQGGYGQGGAAAAAAAASGAGGARRGGLGAGGAGQGYGAGLGGQGGAGQGSASAAAAAAAGGQGGQGGYGGLGSQGSGQGGYGQGGAAAAAAAASGAGGAGRGSLGAGGAGQGYGAGLGGQGGAGQGGAAAAASAAA

SEQ ID NO: 1327 - protein, 135 aa, Argiope trifasciata
GGYGPGAGQQGQQAGQGSGQQGPGGAGQGGPRGQGPYGPGAATAAAAAAGPGYGPGAGQQGPGSQGPGSGGQQGPGSQGPYGPSAAAAAAAAGPGYGPGAGQQGPGSQGPRSGGQQGPGGQGPYGPSAAAAAAAA

SEQ ID NO: 1328 - protein, 140 aa, Argiope trifasciata
GPGYGPGAGQQGPGSGGQQGGPGSGQQGPGGAGQGGPRGQGPYGPGAAAAAAAAAGGYGPGAGQQGPGSQGPGSGGQQGPGSQGPYGPSAAAAAAAAGPGYGPGAGQQGPGSQGPGSGGQQGPGGQGPYGPSAAAAAAAA

SEQ ID NO: 1329 - protein, 140 aa, synthetic construct
  REGION 1..140: note = Description of Artificial Sequence: Synthetic polypeptide
GPGYGPGAGQQGPGSGGQQGGQGSGQQGPGGAGQGGPRGQGPYGPGAAAAAAAAAGGYGPGAGQQGPGSQGPGSGGQQGPGSQGPYGPSAAAAAAAAGPGYGPGAGQQGPGSQGPGSGGQQGPGGQGPYGPSAAAAAAAA

SEQ ID NO: 1330 - protein, 139 aa, Argiope trifasciata
GPGYGPGAGQQGPGSGGQQGGQGSGQQGPGGAGQGGPRGQGPYGPGAAAAAAAAGGYGPGAGQQGPGSQGPGSGGQQGPGSQGPYGPSAAAAAAAAGPGYGPGAGQQGPGSQGPGSGGQQGPGGQGPYGPSDAAAAAAA

SEQ ID NO: 1331 - protein, 139 aa, Argiope trifasciata
GPGYGPGAGQQGPGSGGQQGGQGSGQQGPGGAGQGGPRGQGPYGPGAAAAAAAAGGYGPGAGQQGPGSQGPGSGGQQGPGSQGPYGPSAAAAAAAAGPGYGPGAGQQGPGSQGPGSGGQQGPGSQGPYGPSAAAAAAAA

SEQ ID NO: 1332 - protein, 184 aa, Avicularia juruensis
GAAAASEAAASAAATSTTTTTSTSRAAAAASAAAAASASGAAGAAGAASAASAASASSSLQQSLGSALAQSSSFAAAFAQASSAASAAAIAYALAQTVANQIGFSSYSSAFARAASSAVYSIGGLASASAYAFAFASAFSQVLSNYGLLNINNAYSLASSIASAASSSASSAAAAAASSSSAAA

SEQ ID NO: 1333 - protein, 183 aa, synthetic construct
  REGION 1..183: note = Description of Artificial Sequence: Synthetic polypeptide
GAAAASGTAASAAATSTTTTTSTSRAAAAASAAAAASASGAADAAGAASAASAASASSSLQQSLGSALAQSSSFAAAFAQANSAASAAAIAYALAQTVANQIGFSSYSSAFASAASSAVSSLGGFASASAYAFAFASAFSQVLSNYGLLNINNAYSLASSIASAASSSASSAAAAASSSSAAA

SEQ ID NO: 1334 - protein, 177 aa, Avicularia juruensis
GSGAARAAQTASAASAASASSSLQQSLGSALAQSSSFAAAFDQANSAASAAAIAYALAQSAANQVGLSSYSAAISNAAAAAVGSVGGYASASAYAFAFASGVSQVLSNYGLINLSNALFLASSIANAASASASSAAAAASSSSAATGAAAALGGAGSAAATSTTTITSTSTAVAAAS

SEQ ID NO: 1335 - protein, 236 aa, synthetic construct
  REGION 1..236: note = Description of Artificial Sequence: Synthetic polypeptide
GPGGYGGPGQQGPGQGQQQGPASAAAAAAAAGPGGYGGPGQQGPGQGQQQGPASAAAAAAAAAGPGGYGGPGQQRPGQAQYGRGTGQQGQGPGAQQGPASAAAAAAAGAGLYGGPGQQGPGQGQQQGPASAAAAAAAAAAAGPGGYGGPGQQGPGQAQQQGPASAAAAAAAGPGGYSGPGQQGPGQAQQQGPASAAAAAAAAAGPGGYGGPGQQGPGQGQQQGPASAAAAAAATAA

SEQ ID NO: 1336 - protein, 228 aa, Deinopis spinosa
GPGGYGGPGQQGPGQGQYGPGTGQQGQGPSGQQGPAGAAAAAAAAAGPGGYGGPGQQGPGQGQYGPGAGQQGQGPGGQQGPAGAAAAAAAAAGPGGYGGPGQQGPGQGQQQGRAGAAAAAAAGPGGYGGPGQQGPGQAQQQGPAAAASAGPGGYGGPGQQGPGQGQQKGPASAAAAAAATAAGPGGYGGPGQQGPGQGQYGPGTGQQGQGPGGQQGPASAAAAAAAAA

SEQ ID NO: 1337 - protein, 244 aa, Deinopis spinosa
GPGGYGGPGQPGPGQGQYGPGPGQQGPRQGGQQGPASAAAAAAAGPGGYGGPGQQGPRQGQQQGPASAAAAAAAAAAGPRGYGGPGQQGPVQGGQQGPASAAAAAAAAGVGGYGGPGQQGPGQGQYGPGTGQQGQGPSGQQGPAGAAAAAAGGAAGPGGYGGPGQQGPGQGQYGPGTGQQGQGPSGQQGPAGAAAAAAAAAGPGGYGGPGQQGPGQGQYGPGAGQQGQGPGSQQGPASAAAAAA

SEQ ID NO: 1338 - protein, 300 aa, Deinopis spinosa
GPGGYGGPGQQGPGQGQYGPGTGQQGQGPGGQQGPVGAAAAAAAAVSSGGYGSQGAGQGGQQGSGQGGPAAAGPGGYGGPGQQGPEQGQYGSGAGQQGQGPGGQQGPASAAAAAAAGPGRYGGPGQQGPGQGQYGPGTGQQGQGPASAAAAAAAGPGGYGGPGQQGPGQGRGTGQQGQGLGGQQGPDSAAAAAAAAGPGGYGGPGQQGPGQGQYGPGTGQQGQGPGGQQGPVGAAAAAAAAVSSGGYGSQGAGQGGQQGSGQRGPAAAGPGGYSGPGQQGPGQGGQQGPASAAAAAAAAA

SEQ ID NO: 1339 - protein, 242 aa, Deinopis spinosa
GPGGYVGSGQQGPGQGRGTGQQGQGTGGQQGPASAAASAAAGPGGYGGPGQQGPGQGGQQGPATAAAAAAAAAGPGGYGGPGQQGPGQGQYGPGTGQQGQGPGGQQGPAGAAATAAAAAGPGGYGGPGQQGPEQGQYRPGAGQQGQGPGGQQGPASAAAAAAAGPGGYGGPGQQGPGRGQYGPGTGQQGQGPASAAAAAAAGPGGYGGPGQQGPGQGRGTGQQGQGLGGQQGPDSAAAAAAA

SEQ ID NO: 1340 - protein, 229 aa, Deinopis spinosa
GPGGYGGPGQQGPGQGQYGPGTGQQGQGPGGQQGPVGAAAAAAAAVSSGGYGSQGAGQGGQQGSGQRGPAAAGPGGYSGPGQQGPGQGGQQGPASAAAAAAAAAGPGGYGGSGQQGPGQGRGTGQQGQGPGGQQGPASAAAAAAAGPGGYGGPGQQGPGQGQYGPGTGQQGQGPASAAAAAAAGPGGYGGPGQQGPGQGQYGPGTGQQGQGPGGQQGPGGASAAAAAAA

SEQ ID NO: 1341 - protein, 156 aa, Diguetia canities
GTGGVGGLFLSSGDFGRGGAGAGAGAAAASAAAASSAAAGARGGSGFGVGTGGFGRGGAGAGTGAAAASAAAASAAAAGAGGDGGLFLSSGDFGRGGAGAGAGAAAASAAAASSAAAGARGGSGFGVGTGGFGRGGAGDGASAAAASAAAASAAAA

SEQ ID NO: 1342 - protein, 234 aa, Diguetia canities
GAGGDGGLFLSSGDFGRGGAGAGAGAAAASAAAASSAAAGARGGSGFGVGTGGFGRGGAGDGASAAAASAAAASAAAAGAGGDSGLFLSSGDFGRGGAGAGAGAAAASAAAASAAAAGTGGVGGLFLSSGDFGRGGAGAGAGAAAASAAAASSAAAGARGGSGFGVGTGGFGRGGPGAGTGAAAASAAAASAAAAGAGGDSGLFLSSEDFGRGGAGAGTGAAAASAAAASAAAA

SEQ ID NO: 1343 - protein, 243 aa, Diguetia canities
GSGAGQGTGAGAGAAAAAAGAAGSGAGQGAGSGAGAAAAAAAASAAGAGQGAGSGSGAGAAAAAAAAAGAGQGAGSGSGAGAAAAAAAAAAAAQQQQQQQAAAAAAAAAAAAAGSGQGASFGVTQQFGAPSGAASSAAAAAAAAAAAAAGSGAGQEAGTGAGAAAAAAAAGAAGSGAGQGAGSGAGAAAAAAAAASAAGAGQGAGSGSGAGAAAAAAAAAAAAQQQQQQQAAAAAAAAAAAAA

SEQ ID NO: 1344 - protein, 189 aa, Dolomedes tenebrosus
GGAGQSGSGPYGASYLSSTTYTTSSQGAGGGVGGYGQGSGTGSAAAAAGAAGAGQGGQGGYGQGAGQGGLGGYGQGGGAGAAAAAAAAAGGAGSGQGGYGGQGGLGGYGQGAGAGAAAAAAAGGAGAGQGGFGGQGGYGQGGGAGAAAAAAAAAAAGGAGSGQGGYGGQGGLGGYGQGAGAGAAAAAAA

SEQ ID NO: 1345 - protein, 166 aa, Dolomedes tenebrosus
GGAGAGQGSYGGQGGYGQGGAGAATATAAAAGGAGSGQGGYGGQGGLGGYGQGAGAGAAAAAAAAAGGAGAGQGGYGGQGGQGGYGQGAGAGAAAAAAGGAGAGQGGYGGQGGYGQGGGAGAAAAAAAASGGSGSGQGGYGGQGGLGGYGQGAGAGAGAAASAAAA

SEQ ID NO: 1346 - protein, 152 aa, Dolomedes tenebrosus
GAGSGQGGYGGQGGLGGYGQGAGAGAAAGASGSGSGGAGQGGLGGYGQGAGAGAAAAAAGASGAGQGGFGPYGSSYQSSTSYSVTSQGAAGGLGGYGQGSGAGAAAAGAAGQGGQGGYGQGAGAGAGAGAGQGGLGGYGQGAGSSAASAAAA

SEQ ID NO: 1347 - protein, 228 aa, Euprosthenops australis
GQGGQGGYGGLGQGGYGQGAGSSAAAAAAAAAAAAAAGRGQGGYGQGSGGNAAAAAAAAAAAASGQGGQGGQGGQGQGGYGQGAGSSAAAAAAAAAAAAAAGQGQGRYGQGAGGNAAAAAAAAAAAAAGQGGQGGQGGLGQGGYGQGAGSSAAAAAASAAAAAAGRGQGGYGQGAGGNAAAAAAAAAAAAAAGQGGQGGYGGLGQGGYGQGAGSSAAAAAAAAAAAAA

SEQ ID NO: 1348 - protein, 187 aa, Euprosthenops australis
GGQGGQGQGRYGQGAGSSAAAAAAAAAAAAAAGQGQGGYGQGAGGNAAAAAAAAAAAAAGQGGQGGQGGLGQGGYGQGAGSSAAAAAAAAAAAAAGRGQGGYGQGAGGNAAAAAAAAAEAAAAGQGGQGGYGGLGQGGYGQGAGSSAAAAAAAAAAAAAGRGQGGYGQGAGGNAAAAAAAAAAAAAA

SEQ ID NO: 1349 - protein, 195 aa, Euprosthenops australis
GQGGQGGYGGLGQGGYGQGAGSSAAAAAAAAAAAAAGGQGGQGQGRYGQGAGSSAAAAAAAAAAAAAAGRGQGGYGQGSGGNAAAAAAAAAAAASGQGSQGGQGGQGQGGYGQGAGSSAAAAAAAAAAAAASGRGQGGYGQGAGGNAAAAAAAAAAAAAAGQGGQGGYGGLGQGGYGQGAGSSAAAAAAAAAAAA

SEQ ID NO: 1350 - protein, 187 aa, Euprosthenops australis
GGQGGQGQGGYGQGAGSSAAAAAAAAAAAAAAGRGQGGYGQGSGGNAAAAAAAAAAAASGQGGQGGQGGQGQGGYGQGAGSSAAAAAAAAAAAAAAGQGQGGYGQGAGGNAAAAAAAAAAAAAGQGGQGGQGGLGQGGYGQGAGSSAAAAAAAAAAAAAAGRGQGGYGQGVGGNAAAAAAAAAAAAA

SEQ ID NO: 1351 - protein, 225 aa, Euprosthenops australis
GQGGQGGQGGLGQGGYGQGAGSSAAAAAAAAAAAAAAGRGQGGYGQGSGGNAAAAAAAAAAAASGQGSQGGQGGQGQGGYGQGAGSSAAAAAAAAAAAAASGRGQGGYGQGAGGNAAAAAAAAAAAAAAGQGGQGGYGGLGQGGYGQGAGSSAAAAAAAAAAAAGGQGGQGQGGYGQGSGGSAAAAAAAAAAAAAAAGRGQGGYGQGSGGNAAAAAAAAAAAAAA

SEQ ID NO: 1352 - protein, 219 aa, Euprosthenops australis
GGQGGFSGQGQGGFGPGAGSSAAAAAAAAAAARQGGQGQGGFGQGAGGNAAAAAAAAAAAAAAQQGGQGGFSGRGQGGFGPGAGSSAAAAAAGQGGQGQGGFGQGAGGNAAAAAAAAAAAAAAAGQGGQGRGGFGQGAGGNAAAAAAAAAAAAAAAQQGGQGGFGGRGQGGFGPGAGSSAAAAAAGQGGQGRGGFGQGAGGNAAAASAAAAASAAAAGQ

SEQ ID NO: 1353 - protein, 192 aa, Euprosthenops australis
GGQGRGGFGQGAGGNAAAAAAAAAAAAAAQQVGQFGFGGRGQGGFGPFAGSSAAAAAAASAAAGQGGQGQGGFGQGAGGNAAAAAAAAAAAARQGGQGQGGFSQGAGGNAAAAAAAAAAAAAAAQQGGQGGFGGRGQGGFGPGAGSSAAAAAAATAAAGQGGQGRGGFGQGAGSNAAAAAAAAAAAAAAAGQ

SEQ ID NO: 1354 - protein, 163 aa, Euprosthenops australis
GQGGQGGYGGLGQGGYGQGAGSSAAAAAAAAAAAGRGQGGYGQGSGGNAAAAAAAAAAAASGQGGQGGQGGQGQGGYGQGAGSSAAAAAAAAAAAAAAAGRGQGGYGQGAGGNAAAAAAAAAAAASGQGGQGGQGGQGQGGYGQGAGSSAAAAAAAAAAAAAA

SEQ ID NO: 1355 - protein, 179 aa, Euprosthenops australis
GRGQGGYGQGSGGNAAAAAAAGQGGFGGQEGNGQGAGSAAAAAAAAAAAAGGSGQGRYGGRGQGGYGQGAGAAASAAAAAAAAAAGQGGFGGQEGNGQGAGSAAAAAAAAAAAAGGSGQGGYGGRGQGGYGQGAGAAAAAAAAAAAAAAGQGGQGGFGSQGGNGQGAGSAAAAAAAAAA

SEQ ID NO: 1356 - protein, 214 aa, Gasteracantha mammosa
GGYRPVSGQQGPGQQGPGSGGQQGPGGQRPYGPGAAAAAAAAGGYGPGSGQGGPGQQGPGSGGQQGPGGQGPYGPGAAAAAAAAAGGYGPGSGQGGQQGPGSQGPGSGGQQGPGGQGPYGPSAAAAAAAVGGYGPGAGQQGPGQQGPGSGGQRGPGGQGPYGPGAAAAAAAAAGGYGPASGQQGPGQQGPGSGGQRGPGGQGPYGPGAAAAASA

SEQ ID NO: 1357 - protein, 180 aa, Hypochilus thorelli
GASGAGQGQGYGQQGQGGSSAAAAAAAAAAAAAAAQGQGQGYGQQGQGSAAAAAAAAAAGASGAGQGQGYGQQGQGSAAAAAAAAAAGASGAGQGQGYGQQGQGGSSAAAAAAAAAAAAAAAAQGQGYGQQGQGSAAAAAAAAAGASGAGQGQGYGQQGQGGSSAAAAAAAAAAAAAAAA

SEQ ID NO: 1358 - protein, 150 aa, Hypochilus thorelli
GASGAGQGQGYGQQGQGGSSAAAAAAAAAAAQGQGQGYGQQGQGYGQQGQGGSSAAAAAAAAAAAAAQGQGQGYGQQGQGSAAAAAAAAAGASGAGQGQGYGQQGQGGSSAAAAAAAAAAAAAAAQGQGYGQQGQGSAAAAAAAAAAAAA

SEQ ID NO: 1359 - protein, 182 aa, Kukulcania hibernalis
GEAFSASSASSAVVFESAGPGEEAGSSGDGASAAASAAAAAGAGSGRRGPGGARSRGGAGAGAGAGSGVGGYGSGSGAGAGAGAGAGAGGEGGFGEGQGYGAGAGAGFGSGAGAGAGAGSGAGAGEGVGSGAGAGAGAGFGVGAGAGAGAGAGFGSGAGAGSGAGAGYGAGRAGGRGRGGRG

SEQ ID NO: 1360 - protein, 182 aa, Kukulcania hibernalis
GEAFSASSASSAVVFESAGPGEEAGSSGGGASAAASAAAAAGAGSGRRGPGGARSRGGAGAGAGAGSGVGGYGSGSGAGAGAGAGAGAGGEGGFGEGQGYGAGAGAGFGSGAGAGAGAGSGAGAGEGVGSGAGAGAGAGFGVGAGAGAGAGAGFGSGAGAGSGAGAGYGAGRAGGRGRGGRG

SEQ ID NO: 1361 - protein, 183 aa, Megahexura fulva
GSYAYAQAAAGAFANVLFQAGVLTYANASALASAYASAYASSVASAAASASAGASASSGASASASAAAAAAAAAAASASAGASASAGASASAGASASASASATASAFASAFASAVVQTGYFSNVFGNVYSAAQASYYASASAQAAASAAGFGSSVANAVASASASAAGGVSVGAGAQAYASAL

SEQ ID NO: 1362 - protein, 182 aa, Megahexura fulva
GNGLGQALLANGVLNSGNYLQLANSLAYSFGSSLSQYSSSAAGASAAGAASGAAGAGAGAASSGGSSGSASSSTTTTTTTSTSAAAAAAAAAAAASAAASTSASASASASASASAFSQTFVQTVLQSAAFGSYFGGNLSLQSAQAAASAAAQAAAQQIGLGSYGYALANAVASAFASAGANA

SEQ ID NO: 1363 - protein, 183 aa, Megahexura fulva; identical to SEQ ID NO: 1361

SEQ ID NO: 1364 - protein, 182 aa, Megahexura fulva; identical to SEQ ID NO: 1362

SEQ ID NO: 1365 - protein, 183 aa, Megahexura fulva; identical to SEQ ID NO: 1361

SEQ ID NO: 1366 - protein, 182 aa, synthetic construct; identical to SEQ ID NO: 1362
  REGION 1..182: note = Description of Artificial Sequence: Synthetic polypeptide

SEQ ID NO: 1367 - protein, 213 aa, Nephila clavipes
GGAGQGGYGGLGGQGAGQGGYGGLGGQGAGQGAGAAAAAAAGGAGQGGYGGLGSQGAGRGGQGAGAAAAAAGGAGQGGYGGLGSQGAGRGGLGGQGAGAAAAAAAGGAGQGGYGGLGNQGAGRGGQGAAAAAAGGAGQGGYGGLGSQGAGRGGLGGQGAGAAAAAAGGAGQGGYGGLGGQGAGQGGYGGLGSQGAGRGGLGGQGAGAAAAAAA

SEQ ID NO: 1368 - protein, 186 aa, Nephila clavipes
GGAGQGGLGGQGAGQGAGASAAAAGGAGQGGYGGLGSQGAGRGGEGAGAAAAAAGGAGQGGYGGLGGQGAGQGGYGGLGSQGAGRGGLGGQGAGAAAAGGAGQGGLGGQGAGQGAGAAAAAAGGAGQGGYGGLGSQGAGRGGLGGQGAGAVAAAAAGGAGQGGYGGLGSQGAGRGGQGAGAAAAAA

SEQ ID NO: 1369 - protein, 188 aa, Nephila clavipes
GGAGQRGYGGLGNQGAGRGGLGGQGAGAAAAAAAGGAGQGGYGGLGNQGAGRGGQGAAAAAGGAGQGGYGGLGSQGAGRGGQGAGAAAAAAVGAGQEGIRGQGAGQGGYGGLGSQGSGRGGLGGQGAGAAAAAAGGAGQGGLGGQGAGQGAGAAAAAAGGVRQGGYGGLGSQGAGRGGQGAGAAAAAA

SEQ ID NO: 1370 - protein, 216 aa, Nephila clavipes
GPGGYGPGQQGPGGYGPGQQGPGRYGPGQQGPSGPGSAAAAAAGSGQQGPGGYGPRQQGPGGYGQGQQGPSGPGSAAAASAAASAESGQQGPGGYGPGQQGPGGYGPGQQGPGGYGPGQQGPSGPGSAAAAAAAASGPGQQGPGGYGPGQQGPGGYGPGQQGPSGPGSAAAAAAAASGPGQQGPGGYGPGQQGPGGYGPGQQGLSGPGSAAAAAAA

SEQ ID NO: 1371 - protein, 212 aa, Nephila clavipes
GPGQQGPGGYGPGQQGPSGPGSAAAAAAAAAGPGGYGPGQQGPGGYGPGQQGPSGAGSAAAAAAAGPGQQGLGGYGPGQQGPGGYGPGQQGPGGYGPGSASAAAAAAGPGQQGPGGYGPGQQGPSGPGSASAAAAAAAAGPGGYGPGQQGPGGYAPGQQGPSGPGSASAAAAAAAAGPGGYGPGQQGPGGYAPGQQGPSGPGSAAAAAAAAA

SEQ ID NO: 1372 - protein, 208 aa, Nephila madagascariensis
GRGPEGYGPRQQGPGATAAAAGPGGYGPRQQGPGGYGPGQQGPGAAAAAAAGRGPGGYGPGQQGPGGPGAAAAAAGSEGYGPGQQGPRGPGAAAAGPGGYGPGQQGASAAASAAAGRGPGGYGPGQQGPGGPSAAAAGPGGYGPGQQGPSAAAAAAAGSGPGGYGPGQQGPGGPGAAAAAAGPGGYGPGQQGPGAAAAAAGQAAAAAA

SEQ ID NO: 1373 - protein, 225 aa, Nephila madagascariensis
GRGPGGYGPGQQGPGGPGAAAAAAGPGGYGPGGYGPGQQGPGGPGAAAAAAAGRGPGGYGPGQQGPGQQGPGGSGAAAAAAGRGPGGYGPGQQGPGGPGAAAAAAGPGGYGPGQQGPGAAAAAAAAGRGPGGYGPGQQGPGGPGAAAAAAAGRGPGGYGPGQQGPGQQGPGGSGAAAAAAGRGPGGYGPGQQGPGGPGAAAAAAGPGGYGPGQQGPGAAAAAAAA

SEQ ID NO: 1374 - protein, 225 aa, Nephila madagascariensis
GRGPGGYGPGQQGPGGSGAAAAAAGRGPGGYGPGQQGPGGPGAAAAAAGPGGYGPGQQGTGAAAAAAAGSGAGGYGPGQQGPGGPGAAAAAAGPGGYGPGQQGPGAAAAAAAGSGPGGYGPGQQGPGGSSAAAAAAGPGRYGPGQQGPGAAAAASAGRGPGGYGPGQQGPGGPGAAAAAAGPGGYGPGQQGPGAAAAAAAGSGPGGYGPGQQGPGGPGAAAAAAA

SEQ ID NO: 1375 - protein, 216 aa, Nephila madagascariensis
GRGPGGYGQGQQGPGGPGAAAAAAGPGGYGPGQQGPGAAAAAAAGSGPGGYGPGQQGPGRSGAAAAAAAAGRGPGGYGPGQQGPGGPGAAAAAAGPGGYGPGQQGPGAAAAASAGRGPGGYGPGQQGPGGSGAAAAAAGRGPGGYGPGQQGPGGPGAAAAAAAGRGPGGYGPGQQGPGQQGPGGSGAAAAAAGRGPGGYGPGQQGPGGPGAAAAAA

SEQ ID NO: 1376 - protein, 224 aa, Nephila madagascariensis
GPGGYGPGQQRPGQQGPGGPGAAAAAAGRGPGGYGPGQQGPGGPGAAAAAAAGRGPGGYGPGQQGPGQQGPGGSGAAAAAAGRGPGGYGPGQQGPGGPGAAAAAAGPGGYGPGQQGPGAAAAAAAAGRGPGGYGPGQQGPGGPGAAAAAAAGRGPGGYGPGQQGPGQQGPGGPGAAAAAAGPGGYGPGQQGTGAAAAAAAGSGAGGYGPGQQGPGGPGAAAAAA

SEQ ID NO: 1377 - protein, 203 aa, Nephila madagascariensis
GPGGYGPGQQGPGAAAAAAAGSGPGGYGPGQQGPGGSSAAAAAAGPGRYGPGQQGPGAAAAAAAGSGPGGYGPGQQGPGGPGAAAAAAAAGRGPGGYGPGQQGPGGPGAAAAAAGPGGYGPGQQGPGAAAAAAAGSGPGGYGPGQQGPGGPGAAAAAAAGRGPGGYGQGQQGPGGPGAAAAAAGPGGYGPGQQGPGAAAAAAA

SEQ ID NO: 1378 - protein, 187 aa, Nephila madagascariensis
GSGPGGYGPGQQGPGRSGAAAAAAAAGRGPGGYGPGQQGPGGPGAAAAAAGPGGYGPGQQGPGAAAAASAGRGPGGYGPGQQGPGGSGAAAAAAGRGPGGYGPGQQGPGGPGAAAAAAAGTGPGGYGPGQQGPGGSGAAAAAAGRGPGGYGPGQQGPGGPGAAAAAAGPGGYGPGQQGPGAAAAAAA

SEQ ID NO: 1379 - protein, 174 aa, Nephila madagascariensis
GSGPGGYGPGQQGPGGPGAAAAAAGRGPGGYGPGQQGPGGPGAAAAAAAGRGPGGYGPGQQGPGGSGAAAAASGRGPGGSGPGGYGPGQQGPGAAAAAAAAGRGPGGYGPGQQGPGGPGAAAAAAAGRGPGGYGPGQQGPGGSGAAAAAAGRGPGGYGPGQQGPGGPGAAAAAA

SEQ ID NO: 1380 - protein, 156 aa, Nephila madagascariensis
GPGGYGPGQQGPGAAAAAAGRGPGGYGPGQQGPGGSGAAAAAAGRGPGGYGPGQQGPGGPGAAAAAAGPGGYGPGQQGTGAAAAAAAGSGAGGYGPGQQGPGGPGAAAAAAGPGGYGPGQQGPGAAAAAAAGSGPGGYGPGQQGPGGPGAAAAAAA

SEQ ID NO: 1381 - protein, 175 aa, Nephila pilipes
GGAGQGGYSGLDRQRSGAAAAGASVAAQGGYGGLGGQGAGAAGAAAAGGAGRGGYGGLVGQGAGAAAAGAGEAGQGGYGSLGGQGTGAGGEAAAATGGAGQGGYGGLGGQGASAAGSAGQGGYGGLAGQRAGAAATGGLFDGSRDVGGFSFAVSGSSGGYRRGGYVGNSTAAAAA

SEQ ID NO: 1382 - protein, 177 aa, Nephilengys cruentata
GGAGQGGYGGLGGQGAGAAAAAAGGAGQGGYGGQGAGQGAAAAAASGAGQGGYEGPGAGQGAGAAAAAAGGAGQGGYGGLGGQGAGQGAGAAAAAAGGAGQGGYGGLGGQGAGQGAGAAAAAAGGAGQGGYGGQGAGQGAAAAAAGGAGQGGYGGLGSGQGGYGRQGAGAAAAAAAA

SEQ ID NO: 1383 - protein, 174 aa, Nephilengys cruentata
GGAGQGGYGGLGGQGAGAAAAAAGGAGQGGYGGQGAGQGAAAAAASGAGQGGYGGPGAGQGAGAAAAAAGGAGQGGYGGLGGQGAGQGAGAAAAAAGGAGQGGYGGQGAGQGAAAAAAGGAGQGGYGGLGSGQGGYGGQGAGAAAAAGGAGQGGYGGLGGQGAGQGAGAAAAAA

SEQ ID NO: 1384 - protein, 148 aa, synthetic construct
  REGION 1..148: note = Description of Artificial Sequence: Synthetic polypeptide
GGYGPGSGQQGPGAGQQGPGAGQQGPYGPSAAAAAAAAGGYGPGGAGQQGPGAGQQGPGSQGQSGPGATVAAAAAGGYGPGGAGQQGPGAGQQGQGSQGPYGPAATAAAAAAGGYGPGSGQQGPGAGQQGPGGQGPYGPSAAAAAAAA

SEQ ID NO: 1385 - protein, 146 aa, Parawixia bistriata
GGYGPGSGQQGPGAGPQGPGSQGPYGPGAAAAAAAVGGYGPGSGQQGPGAGQQGPGGQGPYGPSSAAAAAAAGGYGPGGAGQQVPGAGQQGPGNQGPSGPGAAAAAAAAGGYGPGGAGQQGPAAGQQGPGSQGSYGPGAAAAAAAA

SEQ ID NO: 1386 - protein, 193 aa, Parawixia bistriata
GGLGGQGGLGGLGSQGAGLGGYGQGGAGQGGAAAAAAAAGGLGGQGGRGGLGSQGAGQGGYGQGGAGQGGAAAAAAAAGGLGGQGGLGALGSQGAGQGGAGQGGYGQGGAAAAAAGGLGGQGGLGGLGSQGAGQGGYGQGGAGQGGAAAAAAAAGGLGGQGGLGGLGSQGAGPGGYGQGGAGQGGAAAAAAAA

SEQ ID NO: 1387 - protein, 166 aa, Parawixia bistriata
GGLGGQGGLGALGSQGAGQGGYGQGGAGQGGAAAAAAAGGLGGQGGLGALGSQGAGQGGYGQGGSQGAGQGGYGQGGAAAAAAAAGGLGGQGGLGGLGSQGAGQGGYGQGGSQGAGQGGAAAAAAAAGGLGGQGGFGGLGSQGAGQGGYGQGGAGQGGAAAAAAAA

SEQ ID NO: 1388 - protein, 241 aa, Peucetia viridans
GAGAGQGGRGGYGQGGFGGQGSGAGAGASAAAGAGAGQGGRGGYGQGGFGGQGSGAGAGASAAAGAGAGQGGRGGYGQGGFGGQGSGAGAGASAAAAAGAGQGGRGGYGQGGLGGSGSGAGAGAGAAAAAAAGAGGYGQGGLGGYGQGAGAGQGGLGGYGSGAGAGASAAAAAGAGGAGQGGLGGYGQGAGAGQGGLGGYGSGAGAGAAAAAAAGAGGSGQGGLGGYGSGGGAGGASAAAA

SEQ ID NO: 1389 - protein, 166 aa, Poecilotheria regalis
GASDSAAAAALSAASASAASAATAVSTTTSTSTSAATAAAAAASAAGAAGAGAAAGATASSSFGQNLLSGLLRSDAVVSALSQAYSASTASALASSYAQSGADRAGFGNYGSVIASAAASAVASAGNNAGAYAYARAYASAISQSLSSLGILNSGNAIALANAFSS

SEQ ID NO: 1390 - protein, 166 aa, Poecilotheria regalis
GASDSAAAAAVSAASASAASAATASSRTTSTSTSAATAAAAAASAAGSAGAGAAAGATASSSFGQNLLSGLLRSDAVVSALSQAYSASTASALASSYAQSGADRAGLGNYGSVIASAAASAVASAGNNAGAYAYARAYASAISQSLSSLRILNSGNAIALANAFSS

SEQ ID NO: 1391 - protein, 166 aa, Poecilotheria regalis
GASDSAAAAALSAASASAASAATAASTTTSTSTSAATAAAAAASAAGAAGAGAAAGATASSSFGQNLLSGLLRSDAVVSALSQAYSASTASALASSYAQSGADRAGLGNYGSVIASAAASAVASAGNNAGAYAYARAYASAISQSLSSLGILNSGNAIALANAFTS

SEQ ID NO: 1392 - protein, 174 aa, synthetic construct
  REGION 1..174: note = Description of Artificial Sequence: Synthetic polypeptide
GGLGGGQGAGQGGQQGAGQGGYGSGLGGAGQGAGQGASAAAAAAAGGLGGGQGAGQGGQQGAGQGGYGSGLGGAGQGASAAAAAAAAGGLGGGQGAGQGGQQGAGQGGYGSGLGGAGQGASAAAAAAAAGGLGGGQGAGQGGQQGAGQGGYGSGLGGAGQGAGQGASAAAAAAA

SEQ ID NO: 1393 - protein, 177 aa, synthetic construct
  REGION 1..177: note = Description of Artificial Sequence: Synthetic polypeptide
GGSGGQGGQGGYGSGGQGQGQGGYGSGAAAAAAAAAGGSGGQGGQGGYGSGGQGQGQGGYGAGAAAAAAAAAGGSGGQGGAGAGGQGGQGQGQGGYGSGAAAAAAAAAGGLGGQGGYGSGRQGQGQGGYGSGAAAAAAAAAGGSGGQGAQGGYGSGGQGQGQGGYGSGAAAAAAAAA

SEQ ID NO: 1394 - protein, 189 aa, Argiope bruennichi
GGYGPGAGQQGPGSGGQQGPGGQGPYGSGQQGPGGAGQQGPGGQGPYGPGAAAAAAAAAGGYGPGAGQQGPGGAGQQGPGSQGPGGQGPYGPGAGQQGPGSQGPGSGGQQGPGGQGPYGPSAAAAAAAAAGGYGPGAGQRSQGPGGQGPYGPGAGQQGPGSQGPGSGGQQGPGGQGPYGPSAAAAAAAA

SEQ ID NO: 1395 - protein, 126 aa, Argiope bruennichi
GGYGPGAGQQGPGSQGPGSGGQQGPGGQGPYGPGAAAAAAAVGGYGPGAGQQGPGSQGPGSGGQQGPGGQGPYGPSAAAAAAAAGGYGPGAGQQGPGSQGPGSGGQQGPGGQGPYGPSAAAAAAAA

SEQ ID NO: 1396 - protein, 315 aa, Argiope bruennichi
GGYGPGAGQQGPGSGGQQGPGGQGPYGSGQQGPGGAGQQGPGGQGPYGPGAAAAAAAAAGGYGPGAGQQGPGGAGQQGPGSQGPGGQGPYGPGAGQQGPGSQGPGSGGQQGPGGQGPYGPSAAAAAAAAAGGYGPGAGQRSQGPGGQGPYGPGAGQQGPGSQGPGSGGQQGPGGQGPYGPSAAAAAAAAGGYGPGAGQQGPGSQGPGSGGQQGPGGQGPYGPGAAAAAAAVGGYGPGAGQQGPGSQGPGSGGQQGPGGQGPYGPSAAAAAAAAGGYGPGAGQQGPGSQGPGSGGQQGPGGQGPYGPSAAAAAAAA

SEQ ID NO: 1397 - protein, 630 aa, synthetic construct
  REGION 1..630: note = Description of Artificial Sequence: Synthetic polypeptide
GGYGPGAGQQGPGSGGQQGPGGQGPYGSGQQGPGGAGQQGPGGQGPYGPGAAAAAAAAAGGYGPGAGQQGPGGAGQQGPGSQGPGGQGPYGPGAGQQGPGSQGPGSGGQQGPGGQGPYGPSAAAAAAAAAGGYGPGAGQRSQGPGGQGPYGPGAGQQGPGSQGPGSGGQQGPGGQGPYGPSAAAAAAAAGGYGPGAGQQGPGSQGPGSGGQQGPGGQGPYGPGAAAAAAAVGGYGPGAGQQGPGSQGPGSGGQQGPGGQGPYGPSAAAAAAAAGGYGPGAGQQGPGSQGPGSGGQQGPGGQGPYGPSAAAAAAAAGGYGPGAGQQGPGSGGQQGPGGQGPYGSGQQGPGGAGQQGPGGQGPYGPGAAAAAAAAAGGYGPGAGQQGPGGAGQQGPGSQGPGGQGPYGPGAGQQGPGSQGPGSGGQQGPGGQGPYGPSAAAAAAAAAGGYGPGAGQRSQGPGGQGPYGPGAGQQGPGSQGPGSGGQQGPGGQGPYGPSAAAAAAAAGGYGPGAGQQGPGSQGPGSGGQQGPGGQGPYGPGAAAAAAAVGGYGPGAGQQGPGSQGPGSGGQQGPGGQGPYGPSAAAAAAAAGGYGPGAGQQGPGSQGPGSGGQQGPGGQGPYGPSAAAAAAAA

SEQ ID NO: 1398 - protein, 945 aa, synthetic construct
  REGION 1..945: note = Description of Artificial Sequence: Synthetic polypeptide
GGYGPGAGQQGPGSGGQQGPGGQGPYGSGQQGPGGAGQQGPGGQGPYGPGAAAAAAAAAGGYGPGAGQQGPGGAGQQGPGSQGPGGQGPYGPGAGQQGPGSQGPGSGGQQGPGGQGPYGPSAAAAAAAAAGGYGPGAGQRSQGPGGQGPYGPGAGQQGPGSQGPGSGGQQGPGGQGPYGPSAAAAAAAAGGYGPGAGQQGPGSQGPGSGGQQGPGGQGPYGPGAAAAAAAVGGYGPGAGQQGPGSQGPGSGGQQGPGGQGPYGPSAAAAAAAAGGYGPGAGQQGPGSQGPGSGGQQGPGGQGPYGPSAAAAAAAAGGYGPGAGQQGPGSGGQQGPGGQGPYGSGQQGPGGAGQQGPGGQGPYGPGAAAAAAAAAGGYGPGAGQQGPGGAGQQGPGSQGPGGQGPYGPGAGQQGPGSQGPGSGGQQGPGGQGPYGPSAAAAAAAAAGGYGPGAGQRSQGPGGQGPYGPGAGQQGPGSQGPGSGGQQGPGGQGPYGPSAAAAAAAAGGYGPGAGQQGPGSQGPGSGGQQGPGGQGPYGPGAAAAAAAVGGYGPGAGQQGPGSQGPGSGGQQGPGGQGPYGPSAAAAAAAAGGYGPGAGQQGPGSQGPGSGGQQGPGGQGPYGPSAAAAAAAAGGYGPGAGQQGPGSGGQQGPGGQGPYGSGQQGPGGAGQQGPGGQGPYGPGAAAAAAAAAGGYGPGAGQQGPGGAGQQGPGSQGPGGQGPYGPGAGQQGPGSQGPGSGGQQGPGGQGPYGPSAAAAAAAAAGGYGPGAGQRSQGPGGQGPYGPGAGQQGPGSQGPGSGGQQGPGGQGPYGPSAAAAAAAAGGYGPGAGQQGPGSQGPGSGGQQGPGGQGPYGPGAAAAAAAVGGYGPGAGQQGPGSQGPGSGGQQGPGGQGPYGPSAAAAAAAAGGYGPGAGQQGPGSQGPGSGGQQGPGGQGPYGPSAAAAAAAA

SEQ ID NO: 1399 - DNA, 6827 bp, synthetic construct
  misc_feature 1..6827: note = Description of Artificial Sequence: Synthetic polynucleotide
  source 1..6827: mol_type = other DNA
gcgatcgcggtctcactatccagaaaacggaacagattatggaattagtcaaaccaattgtcgacaatgttcgtcaaaatggtgacaaagcccttttagaactaactgccaagtttgatggagtcgctttgaagacacctgtgttagaagctcctttcccagaggaacttatgcaattgccagataacgttaagagagccattgatctctctatagataacgtcaggaaattccatgaagctcaactaacggagacgttgcaagttgagacttgccctggtgtagtctgctctcgttttgcaagacctattgagaaagttggcctctatattcctggtggaaccgcaattctgccttccacttccctgatgctgggtgttcctgccaaagttgctggttgcaaagaaattgtttttgcatctccacctaagaaggatggtacccttaccccagaagtcatctacgttgcccacaaggttggtgctaagtgtatcgtgctagcaggaggcgcccaggcagtagctgctatggcttacggaacagaaactgttcctaagtgtgacaaaatatttggtccaggaaaccagttcgttactgctgccaagatgatggttcaaaatgacacatcagccctgtgtagtattgacatgcctgctgggccttctgaagttctagttattgctgataaatacgctgatccagatttcgttgcctcagaccttctgtctcaagctgaacatggtattgattcccaggtgattctgttggctgtcgatatgacagacaaggagcttgccagaattgaagatgctgttcacaaccaagctgtgcagttgccaagggttgaaattgtacgcaagtgtattgcacactctacaaccctatcggttgcaacctacgagcaggctttggaaatgtccaatcagtacgctcctgaacacttgatcctgcaaatcgagaatgcttcttcttatgttgatcaagtacaacacgctggatctgtgtttgttggtgcctactctccagagagttgtggagattactcctccggtaccaaccacactttgccaacgtacggatatgcccgtcaatacagcggagttaacactgcaaccttccagaagttcatcacttcacaagacgtaactcctgagggactgaaacatattggccaagcagtgatggatctggctgctgttgaaggtctagatgctcaccgcaatgctgttaaggttcgtatggagaaactgggacttatttaattatttagagattttaacttacatttagattcgatagatctaaccggcatctaacatccagtgtttctaatctagtgaatcgagatcaagtctcactctgaacataataaataaggtctaaccccatggaattacatgtccccttgggttctgagattgtcttacccggtggggaaagagccatactcaagttcgtaggaaatgtggagtcaaagtctgggatttttgctggtgttgaactgattggtcaaatgagtggaaaaggaaacctcagctttttgtagaatgtcttggtgtcctcgtccaatcaggtagccatctctgaaatatctggctccgttgcaactccgaacgacctgctggcaacgtaaaattctccggggtaaaacttaaatgtggagtaatggaaccagaaacgtctcttcccttctctctccttccaccgcccgttaccgtccctaggaaattttactctgctggagagcttcttctacggcccccttgcagcaatgctcttcccagcattacgttgcgggtaaaacggaggtcgtgtacccgacctagcagcccagggatggaaaagtcccggccgtcgctggcaataatagcgggcggacgcatgtcatgagattattggaaaccaccagaatcgaatataaaaggcgaacacctttcccaattttggtttctcctgacccaaagactttaaatttaatttatttgtccctatttcaatcaattgaacaactatcaggcgcgccgaaacgatgagatttccttcaatttttactgctgttttattcgcagcatcctccgcattagctgctccagtcaacactacaacagaagatgaaacggcacaaattccggctgaagctgtcatcggttactcagatttagaaggggatttcgatgttgctgttttgccattttccaacagcacaaataacgggttattgtttataaatactactattgccagcattgctgctaaagaagaaggggtatctctcgagaaaagagaggctgaagcaaggtatcgctcatcgcgaaagtgaaacgtgatttcatgcgtcattttgaacattttgtaaatcttatttaataatgtgtgcggcaattcacatttaatttatgaatgttttcttaacatatcgcggcaactcaagaaacggcaggttcggatcttagctactagagattaaggaggtaaaaaaaatgagtgtgatcgctaaacaaatgacctacaaggtttatatgtcaggcacggtcaatggacactactttgaggtcgaaggtgatggaaaaggtaagccctacgagggggagcagacggtaaagctcactgtcaccaagggcggacctctgccatttgcttgggatattttatcaccacagtgtcagtacggaagcataccattcaccaagtaccctgaagatatccctgactatgtaaagcagtcattcccggagggctatacatgggagaggatcatgaactttgaagatggtgcagtgtgtactgtcagcaatgattccagcatccaaggcaactgtttcatctaccatgtcaagttctctggtttgaactttcctcccaatggacctgtcatgcagaagaaaacacagggctgggaacccaacactgagcgtctctttgcacgagatggaatgctgctaggaaacaactttatggctctgaagttagaaggaggcggtcactatttgtgtgaatttaaaactacttacaaggcaaagaagcctgtgaagatgccagggtatcactatgttgaccgcaaactggatgtaaccaatcacaacaaggattacacttcggttgagcagtgtgaaatttccattgcacgcaaacctgtggtcgcctaaggatctctccaaagcccgccgaaaggcgggcttttctgtgcgatgttgctgacagaggtgactacaaagatgacgacgataaagattacaaagacgatgacgataaggactataaagatgatgacgacaaataataacctgcaggagacatgactgttcctcagttcaagttgggcacttacgagaagaccggtcttgctagattctaatcaagaggatgtcagaatgccatttgcctgagagatgcaggcttcatttttgattacttttttatttgtaacctatatagtataggattttttttgtcattttgtttcttctcgtacgagcttgctcctgatcagcctatctcgcagctgatgaatatcttgtggtaggggtttgggaaaatcattcgagtttgatgtttttcttggtatttcccactcctcttcagagtacagaagattaagtgagaggatccttcagtaatgtcttgtttcttttgttgcagtggtgagccattttgacttcgtgaaagtttctttagaatagttgtttccagaggccaaacattccacccgtagtaaagtgcaagcgtaggaagaccaagactggcataaatcaggtataagtgtcgagcactggcaggtgatcttctgaaagtttctactagcagataagatccagtagtcatgcatatggcaacaatgtaccgtgtggatctaagaacgcgtcctactaaccttcgcattcgttggtccagtttgttgttatcgatcaacgtgacaaggttgtcgattccgcgtaagcatgcatacccaaggacgcctgttgcaattccaagtgagccagttccaacaatctttgtaatattagagcacttcattgtgttgcgcttgaaagtaaaatgcgaacaaattaagagataatctcgaaaccgcgacttcaaacgccaatatgatgtgcggcacacaataagcgttcatatccgctgggtgactttctcgctttaaaaaattatccgaaaaaatttttgacggctagctcagtcctaggtacgctagcattaaagaggagaaaatgactactcttgatgacacagcctacagatataggacatcagttccgggtgacgcagaggctatcgaagccttggacggttcattcactactgatacggtgtttagagtcaccgctacaggtgatggcttcaccttgagagaggttcctgtagacccacccttaacgaaagttttccctgatgacgaatcggatgacgagtctgatgctggtgaggacggtgaccctgattccagaacatttgtcgcatacggagatgatggtgacctggctggctttgttgtggtgtcctacagcggatggaatcgtagactcacagttgaggacatcgaagttgcacctgaacatcgtggtcacggtgttggtcgtgcactgatgggactggcaacagagtttgctagagaaagaggagccggacatttgtggttagaagtgaccaatgtcaacgctcctgctattcacgcatataggcgaatgggtttcactttgtgcggtcttgatactgctttgtatgacggaactgcttctgatggtgaacaagctctttacatgagtatgccatgtccatagcacgtccgacggcggcccacgggtcccaggcctcggagatccgtcccccttttcctttgtcgatatcatgtaattagttatgtcacgcttacattcacgccctccccccacatccgctctaaccgaaaaggaaggagttagacaacctgaagtctaggtccctatttatttttttatagttatgttagtattaagaacgttatttatatttcaaatttttcttttttttctgtacagacgcgtgtacgcatgtaacattatactgaaaaccttgcttgagaaggttttgggacgctcgaaggctttaatttgcaagctgcggccgcgcaaagttggtagatgtgacttccactgttgcttctggtataatccccattattgatgctcggcaattgactactgaatacgaactttctgaagatgtcaaaaagttccctgtcagtgaaattttgttggcgtctttgactactgaccgccccgatggtctattcactactttggtggctgactcttctaattactcgttgggcctggtgtactcgtccaaaaagtctattccggaggctataaggacacaaactggagtctaccaatctcgtcgtcacggtttgtggtataaaggtgctacatctggagcaactcaaaagttgctgggtatcgaattggattgtgatggagactgcttgaaatttgtggttgaacaaacaggtgttggtttctgtcacttggaacgcacttcctgttttggccaatcaaagggtcttagagccatggaagccaccttgtgggatcgtaagagcaatgctccagaaggttcttataccaaacggttatttgacgacgaagttttgttgaacgctaaaattagggaggaagctgatgaacttgcagaagctaaatccaaggaagatatagcctgggaatgtgctgacttattttattttgcattagttagatgtgccaagtacggtgtgacgttggacgaggtggagagaaacctggatatgaagtccctaaaggtcactagaaggaaaggagatgccaagccaggatacaccaaggaacaacctaaagaagaatccaaacctaaagaagtcccttctgaaggtcgtattgaattgtgcaaaattgacgtttctaaggcctcctcacaagaaattgaagatgcccttcgtcgtcctatagagaccttaattaagcgctcggtcgttcggctgcggcgagcggtatcagctcactcaaaggcggtaatacggttatccacagaatcaggggataacgcaggaaagaacatgtgagcaaaaggccagcaaaaggccaggaaccgtaaaaaggccgcgttgctggcgtttttccataggctccgcccccctgacgagcatcacaaaaatcgacgctcaagtcagaggtggcgaaacccgacaggactataaagataccaggcgtttccccctggaagctccctcgtgcgctctcctgttccgaccctgccgcttaccggatacctgtccgcctttctcccttcgggaagcgtggcgctttctcatagctcacgctgtaggtatctcagttcggtgtaggtcgttcgctccaagctgggctgtgtgcacgaaccccccgttcagcccgaccgctgcgccttatccggtaactatcgtcttgagtccaacccggtaagacacgacttatcgccactggcagcagccactggtaacaggattagcagagcgaggtatgtaggcggtgctacagagttcttgaagtggtggcctaactacggctacactagaagaacagtatttggtatctgcgctctgctgaagccagttaccttcggaaaaagagttggtagctcttgatccggcaaacaaaccaccgctggtagcggtggtttttttgtttgcaagcagcagattacgcgcagaaaaaaaggatctcaagaagatcctttgatcttttctacggggtctgacgctcagtggaacgaaaactcacgttaagggattttggtcatgagattatcaaagacgtcgtagactcctgaatgac

SEQ ID NO: 1400 - DNA, 6325 bp, synthetic construct
  misc_feature 1..6325: note = Description of Artificial Sequence: Synthetic polynucleotide
  source 1..6325: mol_type = other DNA
tctagaggtctcacgttaggtcagtgatgacaatggaccaaattgttgcaaggtttttctttttctttcatcggcacatttcagcctcacatgcgactattatcgatcaatgaaatccatcaagattgaaatcttaaaattgcccctttcacttgacaggatccttttttgtagaaatgtcttggtgtcctcgtccaatcaggtagccatctctgaaatatctggctccgttgcaactccgaacgacctgctggcaacgtaaaattctccggggtaaaacttaaatgtggagtaatggaaccagaaacgtctcttcccttctctctccttccaccgcccgttaccgtccctaggaaattttactctgctggagagcttcttctacggcccccttgcagcaatgctcttcccagcattacgttgcgggtaaaacggaggtcgtgtacccgacctagcagcccagggatggaaaagtcccggccgtcgctggcaataatagcgggcggacgcatgtcatgagattattggaaaccaccagaatcgaatataaaaggcgaacacctttcccaattttggtttctcctgacccaaagactttaaatttaatttatttgtccctatttcaatcaattgaacaactatcaggcgcgccgaaacgatgagatttccttcaatttttactgctgttttattcgcagcatcctccgcattagctgctccagtcaacactacaacagaagatgaaacggcacaaattccggctgaagctgtcatcggttactcagatttagaaggggatttcgatgttgctgttttgccattttccaacagcacaaataacgggttattgtttataaatactactattgccagcattgctgctaaagaagaaggggtatctctcgagaaaagagaggctgaagcaaggtatcgctcatcgcgaaagtgaaacgtgatttcatgcgtcattttgaacattttgtaaatcttatttaataatgtgtgcggcaattcacatttaatttatgaatgttttcttaacatatcgcggcaactcaagaaacggcaggttcggatcttagctactagagattaaggaggtaaaaaaaatgagtgtgatcgctaaacaaatgacctacaaggtttatatgtcaggcacggtcaatggacactactttgaggtcgaaggtgatggaaaaggtaagccctacgagggggagcagacggtaaagctcactgtcaccaagggcggacctctgccatttgcttgggatattttatcaccacagtgtcagtacggaagcataccattcaccaagtaccctgaagatatccctgactatgtaaagcagtcattcccggagggctatacatgggagaggatcatgaactttgaagatggtgcagtgtgtactgtcagcaatgattccagcatccaaggcaactgtttcatctaccatgtcaagttctctggtttgaactttcctcccaatggacctgtcatgcagaagaaaacacagggctgggaacccaacactgagcgtctctttgcacgagatggaatgctgctaggaaacaactttatggctctgaagttagaaggaggcggtcactatttgtgtgaatttaaaactacttacaaggcaaagaagcctgtgaagatgccagggtatcactatgttgaccgcaaactggatgtaaccaatcacaacaaggattacacttcggttgagcagtgtgaaatttccattgcacgcaaacctgtggtcgcctaaggatctctccaaagcccgccgaaaggcgggcttttctgtgcgatgttgctgacagaggtgactacaaagatgacgacgataaagattacaaagacgatgacgataaggactataaagatgatgacgacaaataataacctgcaggagacatgactgttcctcagttcaagttgggcacttacgagaagaccggtcttgctagattctaatcaagaggatgtcagaatgccatttgcctgagagatgcaggcttcatttttgattacttttttatttgtaacctatatagtataggattttttttgtcattttgtttcttctcgtacgagcttgctcctgatcagcctatctcgcagctgatgaatatcttgtggtaggggtttgggaaaatcattcgagtttgatgtttttcttggtatttcccactcctcttcagagtacagaagattaagtgagaggatccttcagtaatgtcttgtttcttttgttgcagtggtgagccattttgacttcgtgaaagtttctttagaatagttgtttccagaggccaaacattccacccgtagtaaagtgcaagcgtaggaagaccaagactggcataaatcaggtataagtgtcgagcactggcaggtgatcttctgaaagtttctactagcagataagatccagtagtcatgcatatggcaacaatgtaccgtgtggatctaagaacgcgtcctactaaccttcgcattcgttggtccagtttgttgttatcgatcaacgtgacaaggttgtcgattccgcgtaagcatgcatacccaaggacgcctgttgcaattccaagtgagccagttccaacaatctttgtaatattagagcacttcattgtgttgcgcttgaaagtaaaatgcgaacaaattaagagataatctcgaaaccgcgacttcaaacgccaatatgatgtgcggcacacaataagcgttcatatccgctgggtgactttctcgctttaaaaaattatccgaaaaaatttttgacggctagctcagtcctaggtacgctagcattaaagaggagaaaatgactactcttgatgacacagcctacagatataggacatcagttccgggtgacgcagaggctatcgaagccttggacggttcattcactactgatacggtgtttagagtcaccgctacaggtgatggcttcaccttgagagaggttcctgtagacccacccttaacgaaagttttccctgatgacgaatcggatgacgagtctgatgctggtgaggacggtgaccctgattccagaacatttgtcgcatacggagatgatggtgacctggctggctttgttgtggtgtcctacagcggatggaatcgtagactcacagttgaggacatcgaagttgcacctgaacatcgtggtcacggtgttggtcgtgcactgatgggactggcaacagagtttgctagagaaagaggagccggacatttgtggttagaagtgaccaatgtcaacgctcctgctattcacgcatataggcgaatgggtttcactttgtgcggtcttgatactgctttgtatgacggaactgcttctgatggtgaacaagctctttacatgagtatgccatgtccatagcacgtccgacggcggcccacgggtcccaggcctcggagatccgtcccccttttcctttgtcgatatcatgtaattagttatgtcacgcttacattcacgccctccccccacatccgctctaaccgaaaaggaaggagttagacaacctgaagtctaggtccctatttatttttttatagttatgttagtattaagaacgttatttatatttcaaatttttcttttttttctgtacagacgcgtgtacgcatgtaacattatactgaaaaccttgcttgagaaggttttgggacgctcgaaggctttaatttgcaagctggtaccactcaatcccgactgtcaatcattcatccttgcgtcttttgaacatctatgcttccacaagtcaattcttgatttagtatacacataaccaaatttggatcaagtttgaagtaaaactttaacttcagctccttacatttgcactaagatctctgctactctggtcccaagtgaaccaccttttggaccctattgaccggaccttaacttgccaaacctaaacgcttaatgcctcagacgttttaatgcctctcaacacctccaaggttgctttcttgagcatgcctactaggaactttaacgaactgtggggttgcagacagtttcaggcgtgtcccgaccaatatggcctactagactctctgaaaaatcacagttttccagtagttccgatcaaattaccatcgaaatggtcccataaacggacatttgacatccgttcctgaattatagtcttccaccgtggatcatggtgttcctttttttcccaaagaatatcagcatcccttaactacgttagagaccgaattcgcgctcggtcgttcggctgcggcgagcggtatcagctcactcaaaggcggtaatacggttatccacagaatcaggggataacgcaggaaagaacatgtgagcaaaaggccagcaaaaggccaggaaccgtaaaaaggccgcgttgctggcgtttttccataggctccgcccccctgacgagcatcacaaaaatcgacgctcaagtcagaggtggcgaaacccgacaggactataaagataccaggcgtttccccctggaagctccctcgtgcgctctcctgttccgaccctgccgcttaccggatacctgtccgcctttctcccttcgggaagcgtggcgctttctcatagctcacgctgtaggtatctcagttcggtgtaggtcgttcgctccaagctgggctgtgtgcacgaaccccccgttcagcccgaccgctgcgccttatccggtaactatcgtcttgagtccaacccggtaagacacgacttatcgccactggcagcagccactggtaacaggattagcagagcgaggtatgtaggcggtgctacagagttcttgaagtggtggcctaactacggctacactagaagaacagtatttggtatctgcgctctgctgaagccagttaccttcggaaaaagagttggtagctcttgatccggcaaacaaaccaccgctggtagcggtggtttttttgtttgcaagcagcagattacgcgcagaaaaaaaggatctcaagaagatcctttgatcttttctacggggtctgacgctcagtggaacgaaaactcacgttaagggattttggtcatgagattatcaaagacgtcccagccaggacagaaatgcctcgacttcgctgctgcccaaggttgccgggtgacgcacaccgtggaaacggatgaaggcacgaacccagtggacataagcctgttcggttcgtaagctgtaatgcaagtagcgtatgcgctcacgcaactggtccagaaccttgaccgaacgcagcggtggtaacggcgcagtggcggttttcatggcttgttatgactgtttttttggggtacagtctatgcctcgggcatccaagcagcaagcgcgttacgccgtgggtcgatgtttgatgttatggagcagcaacgatgttacgcagcagggcagtcgccctaaaacaaagttaaacatcatgagggaagcggtgatcgccgaagtatcgactcaactatcagaggtagttggcgtcatcgagcgccatctcgaaccgacgttgctggccgtacatttgtacggctccgcagtggatggcggcctgaagccacacagtgatattgatttgctggttacggtgaccgtaaggcttgatgaaacaacgcggcgagctttgatcaacgaccttttggaaacttcggcttcccctggagagagcgagattctccgcgctgtagaagtcaccattgttgtgcacgacgacatcattccgtggcgttatccagctaagcgcgaactgcaatttggagaatggcagcgcaatgacattcttgcaggtatcttcgagccagccacgatcgacattgatctggctatcttgctgacaaaagcaagagaacatagcgttgccttggtaggtccagcggcggaggaactctttgatccggttcctgaacaggatctatttgaggcgctaaatgaaaccttaacgctatggaactcgccgcccgactgggctggtgatgagcgaaatgtagtgcttacgttgtcccgcatttggtacagcgcagtaaccggcaaaatcgcgccgaaggatgtcgctgccgactgggcaatggagcgcctgccggcccagtatcagcccgtcatacttgaagctagacaggcttatcttggacaagaagaagatcgcttggcctcgcgcgcagatcagttggaagaatttgtccactacgtgaaaggcgagatcaccaaggtagtcggcaaataactgtcagaccaagtttactcatatatactttagattgatttaaaacttcatttttaatttaaaaggatctaggtgaagatcctt

SEQ ID NO: 1401 - DNA, 6983 bp, synthetic construct
  misc_feature 1..6983: note = Description of Artificial Sequence: Synthetic polynucleotide
  source 1..6983: mol_type = other DNA
tctagaggtctcacgttaggtcagtgatgacaatggaccaaattgttgcaaggtttttctttttctttcatcggcacatttcagcctcacatgcgactattatcgatcaatgaaatccatcaagattgaaatcttaaaattgcccctttcacttgacaggatccttttttgtagaaatgtcttggtgtcctcgtccaatcaggtagccatctctgaaatatctggctccgttgcaactccgaacgacctgctggcaacgtaaaattctccggggtaaaacttaaatgtggagtaatggaaccagaaacgtctcttcccttctctctccttccaccgcccgttaccgtccctaggaaattttactctgctggagagcttcttctacggcccccttgcagcaatgctcttcccagcattacgttgcgggtaaaacggaggtcgtgtacccgacctagcagcccagggatggaaaagtcccggccgtcgctggcaataatagcgggcggacgcatgtcatgagattattggaaaccaccagaatcgaatataaaaggcgaacacctttcccaattttggtttctcctgacccaaagactttaaatttaatttatttgtccctatttcaatcaattgaacaactatcaggcgcgccaggtgaaacgatgagatttccttcaatttttactgctgttttattcgcagcatcctccgcattagctgctccagtcaacactacaacagaagatgaaacggcacaaattccggctgaagctgtcatcggttactcagatttagaaggggatttcgatgttgctgttttgccattttccaacagcacaaataacgggttattgtttataaatactactattgccagcattgctgctaaagaagaaggggtatctctcgagaaaagagaggctgaagctgatgcacacaaatccgaagtcgcacacagattcaaagatttgggtgaggaaaactttaaggctttggtccttattgcttttgcccagtacttacagcaatgtccattcgaggatcatgtcaaactggttaatgaggttacagagttcgccaagacttgtgttgctgatgagtccgcagaaaactgcgataaaagtctgcacactttgtttggtgacaaattgtgtactgttgccacactcagagaaacttacggagagatggctgattgttgtgcaaaacaagagcctgagagaaacgaatgttttctgcaacataaagatgataaccccaatctacctcgtttggttagacctgaagtggacgttatgtgtactgcttttcacgataacgaggaaactttcctgaaaaagtacttatatgaaatcgcaaggagacatccctacttctatgcaccagaactgttgtttttcgctaaaaggtacaaagcagcattcacagaatgttgtcaagccgctgacaaggctgcttgtctgttgcccaaattggatgagttgcgtgacgaaggtaaggcctcttcagccaagcaaagacttaagtgcgcaagtttgcagaaatttggtgaacgtgctttcaaggcttgggctgtagcaagattatcgcaaagattccctaaagctgagttcgcagaggtttccaaacttgttactgacttgacaaaagttcatacggaatgttgccacggtgacttgcttgaatgtgctgatgaccgtgctgatctagcaaaatacatctgtgaaaatcaagactctatctcatccaagttaaaggagtgttgcgaaaaacctttgctagaaaagtcacattgcatagctgaggttgaaaatgatgaaatgccagcagaccttccttcactggctgctgattttgtagaatctaaagacgtttgcaagaattacgctgaagctaaggacgttttccttggcatgtttctgtatgaatatgctcgtagacatccagactattctgttgtgctgcttttaagactggctaagacttatgaaacgaccttagaaaagtgttgtgccgctgctgacccacacgagtgttatgcaaaagtctttgacgagttcaagccattggtcgaggagcctcagaacttgattaaacaaaattgtgaactgtttgaacaattgggagagtacaagttccaaaacgcactgcttgtaagatacaccaaaaaggttccacaggtttcgacaccaacattagtggaagtttcccgtaatctgggtaaagtcggatcgaagtgttgtaagcatcctgaggctaaaaggatgccatgtgccgaagattacttgtccgtcgtgttgaatcaattgtgcgtgttgcatgagaaaacaccggtgagcgacagggttaccaaatgttgcactgagagcctagtcaatagaaggccatgtttctctgccttagaggtggacgaaacttatgtccccaaggagtttaatgcagagacttttaccttccatgcagatatttgcacactctccgagaaagagcgacagatcaaaaagcaaacggctctggtggaattggtgaaacacaaacctaaggccacaaaggagcaacttaaggctgtgatggatgatttcgcagcctttgtagagaaatgttgtaaggctgatgacaaggaaacatgctttgcagaggaaggaaagaaattggtagctgctagccaggctgcattgggtttggactacaaagatgacgacgataaagattacaaagacgatgacgataaggactataaagatgatgacgacaaataataaggtcctgcaggagacatgactgttcctcagttcaagttgggcacttacgagaagaccggtcttgctagattctaatcaagaggatgtcagaatgccatttgcctgagagatgcaggcttcatttttgattacttttttatttgtaacctatatagtataggattttttttgtcattttgtttcttctcgtacgagcttgctcctgatcagcctatctcgcagctgatgaatatcttgtggtaggggtttgggaaaatcattcgagtttgatgtttttcttggtatttcccactcctcttcagagtacagaagattaagtgagaggatccttcagtaatgtcttgtttcttttgttgcagtggtgagccattttgacttcgtgaaagtttctttagaatagttgtttccagaggccaaacattccacccgtagtaaagtgcaagcgtaggaagaccaagactggcataaatcaggtataagtgtcgagcactggcaggtgatcttctgaaagtttctactagcagataagatccagtagtcatgcatatggcaacaatgtaccgtgtggatctaagaacgcgtcctactaaccttcgcattcgttggtccagtttgttgttatcgatcaacgtgacaaggttgtcgattccgcgtaagcatgcatacccaaggacgcctgttgcaattccaagtgagccagttccaacaatctttgtaatattagagcacttcattgtgttgcgcttgaaagtaaaatgcgaacaaattaagagataatctcgaaaccgcgacttcaaacgccaatatgatgtgcggcacacaataagcgttcatatccgctgggtgactttctcgctttaaaaaattatccgaaaaaatttttgacggctagctcagtcctaggtacgctagcattaaagaggagaaaatggctaaactgacctctgctgttccggttctgaccgctcgtgacgttgctggtgctgttgagttctggaccgaccgtctgggtttctctcgtgacttcgttgaagacgacttcgctggtgttgttcgtgacgacgttaccctgttcatctctgctgttcaggaccaggttgttccggacaacaccctggcttgggtttgggttcgtggtctggacgaactgtacgctgaatggtctgaagttgtttctaccaacttccgtgacgcttctggtccggctatgaccgaaatcggtgaacagccgtggggtcgtgagttcgctctgcgtgacccggctggtaactgcgttcacttcgttgctgaagaacaggactaacacgtccgacggcggcccacgggtcccaggcctcggagatccgtcccccttttcctttgtcgatatcatgtaattagttatgtcacgcttacattcacgccctccccccacatccgctctaaccgaaaaggaaggagttagacaacctgaagtctaggtccctatttatttttttatagttatgttagtattaagaacgttatttatatttcaaatttttcttttttttctgtacagacgcgtgtacgcatgtaacattatactgaaaaccttgcttgagaaggttttgggacgctcgaaggctttaatttgcaagctggtaccactcaatcccgactgtcaatcattcatccttgcgtcttttgaacatctatgcttccacaagtcaattcttgatttagtatacacataaccaaatttggatcaagtttgaagtaaaactttaacttcagctccttacatttgcactaagatctctgctactctggtcccaagtgaaccaccttttggaccctattgaccggaccttaacttgccaaacctaaacgcttaatgcctcagacgttttaatgcctctcaacacctccaaggttgctttcttgagcatgcctactaggaactttaacgaactgtggggttgcagacagtttcaggcgtgtcccgaccaatatggcctactagactctctgaaaaatcacagttttccagtagttccgatcaaattaccatcgaaatggtcccataaacggacatttgacatccgttcctgaattatagtcttccaccgtggatcatggtgttcctttttttcccaaagaatatcagcatcccttaactacgttagagaccgaattcgcgctcggtcgttcggctgcggcgagcggtatcagctcactcaaaggcggtaatacggttatccacagaatcaggggataacgcaggaaagaacatgtgagcaaaaggccagcaaaaggccaggaaccgtaaaaaggccgcgttgctggcgtttttccataggctccgcccccctgacgagcatcacaaaaatcgacgctcaagtcagaggtggcgaaacccgacaggactataaagataccaggcgtttccccctggaagctccctcgtgcgctctcctgttccgaccctgccgcttaccggatacctgtccgcctttctcccttcgggaagcgtggcgctttctcatagctcacgctgtaggtatctcagttcggtgtaggtcgttcgctccaagctgggctgtgtgcacgaaccccccgttcagcccgaccgctgcgccttatccggtaactatcgtcttgagtccaacccggtaagacacgacttatcgccactggcagcagccactggtaacaggattagcagagcgaggtatgtaggcggtgctacagagttcttgaagtggtggcctaactacggctacactagaagaacagtatttggtatctgcgctctgctgaagccagttaccttcggaaaaagagttggtagctcttgatccggcaaacaaaccaccgctggtagcggtggtttttttgtttgcaagcagcagattacgcgcagaaaaaaaggatctcaagaagatcctttgatcttttctacggggtctgacgctcagtggaacgaaaactcacgttaagggattttggtcatgagattatcaaagacgtcccagccaggacagaaatgcctcgacttcgctgctgcccaaggttgccgggtgacgcacaccgtggaaacggatgaaggcacgaacccagtggacataagcctgttcggttcgtaagctgtaatgcaagtagcgtatgcgctcacgcaactggtccagaaccttgaccgaacgcagcggtggtaacggcgcagtggcggttttcatggcttgttatgactgtttttttggggtacagtctatgcctcgggcatccaagcagcaagcgcgttacgccgtgggtcgatgtttgatgttatggagcagcaacgatgttacgcagcagggcagtcgccctaaaacaaagttaaacatcatgagggaagcggtgatcgccgaagtatcgactcaactatcagaggtagttggcgtcatcgagcgccatctcgaaccgacgttgctggccgtacatttgtacggctccgcagtggatggcggcctgaagccacacagtgatattgatttgctggttacggtgaccgtaaggcttgatgaaacaacgcggcgagctttgatcaacgaccttttggaaacttcggcttcccctggagagagcgagattctccgcgctgtagaagtcaccattgttgtgcacgacgacatcattccgtggcgttatccagctaagcgcgaactgcaatttggagaatggcagcgcaatgacattcttgcaggtatcttcgagccagccacgatcgacattgatctggctatcttgctgacaaaagcaagagaacatagcgttgccttggtaggtccagcggcggaggaactctttgatccggttcctgaacaggatctatttgaggcgctaaatgaaaccttaacgctatggaactcgccgcccgactgggctggtgatgagcgaaatgtagtgcttacgttgtcccgcatttggtacagcgcagtaaccggcaaaatcgcgccgaaggatgtcgctgccgactgggcaatggagcgcctgccggcccagtatcagcccgtcatacttgaagctagacaggcttatcttggacaagaagaagatcgcttggcctcgcgcgcagatcagttggaagaatttgtccactacgtgaaaggcgagatcaccaaggtagtcggcaaataactgtcagaccaagtttactcatatatactttagattgatttaaaacttcatttttaatttaaaaggatctaggtgaagatcctt

SEQ ID NO: 1402 - DNA, 3944 bp, synthetic construct
  misc_feature 1..3944: note = Description of Artificial Sequence: Synthetic polynucleotide
  source 1..3944: mol_type = other DNA
ggcgcgcctatgcgatggtctcaaggtgaaagtgaaacgtgatttcatgcgtcattttgaacattttgtaaatcttatttaataatgtgtgcggcaattcacatttaatttatgaatgttttcttaacatatcgcggcaactcaagaaacggcaggttcggatcttagctactagagattaaggaggtaaaaaaaatgagtgtgatcgctaaacaaatgacctacaaggtttatatgtcaggcacggtcaatggacactactttgaggtcgaaggtgatggaaaaggtaagccctacgagggggagcagacggtaaagctcactgtcaccaagggcggacctctgccatttgcttgggatattttatcaccacagtgtcagtacggaagcataccattcaccaagtaccctgaagatatccctgactatgtaaagcagtcattcccggagggctatacatgggagaggatcatgaactttgaagatggtgcagtgtgtactgtcagcaatgattccagcatccaaggcaactgtttcatctaccatgtcaagttctctggtttgaactttcctcccaatggacctgtcatgcagaagaaaacacagggctgggaacccaacactgagcgtctctttgcacgagatggaatgctgctaggaaacaactttatggctctgaagttagaaggaggcggtcactatttgtgtgaatttaaaactacttacaaggcaaagaagcctgtgaagatgccagggtatcactatgttgaccgcaaactggatgtaaccaatcacaacaaggattacacttcggttgagcagtgtgaaatttccattgcacgcaaacctgtggtcgcctaaggatctctccaaagcccgccgaaaggcgggcttttctgtaggtacgtcttcatcgctatcctgcaggcggatatcttcggaaaaaaaaaggcctgcgattaccagcaggcctgttgagatcgaggaaatctcgggatctagtcttgagctttgctcactcaaaggcggtaatgcggccgctagaaatattttatctgattaataagatgatcttcttgagatcgttttggtctgcgcgtaatctcttgctctgaaaacgaaaaaaccgccttgcagggcggtttttcgaaggttctctgagctaccaactctttgaaccgaggtaactggcttggaggagcgcagtcaccaaaacttgtcctttcagtttagccttaaccggcgcatgacttcaagactaactcctctaaatcaattaccagtggctgctgccagtggtgcttttgcatgtctttccgggttggactcaagacgatagttaccggataaggcgcagcggtcggactgaacggggggttcgtgcatacagtccagcttggagcgaactgcctacccggaactgagtgtcaggcgtggaatgagacaaacgcggccataacagcggaatgacaccggtaaaccgaaaggcaggaacaggagagcgcacgagggagccgccagggggaaacgcctggtatctttatagtcctgtcgggtttcgccaccactgatttgagcgtcagatttcgtgatgcttgtcaggggggcggagcctatggaaaaacggctttgccgcggccctctcacttccctgttaagtatcttcctggcatcttccaggaaatctccgccccgttcgtaagccatttccgctcgccgcagtcgaacgaccgagcgtagcgagtcagtgagcgaggaagcggaatatatcctgtatcacatattctgctgacgcaccggtgcagccttttttctcctgccacatgaagcacttcactgacaccctcatcagtgccaacatagtaagccagtatacactccgctagcgctgatgtccggcggtgcggtaccttgatcgggcacgtaagaggttccaactttcaccataatgaaataagatcactaccgggcgtattttttgagttatcgagattttcaggagctaaggaagctaaaatggagaaaaaaatcactggatataccaccgttgatatatcccaatggcatcgtaaagaacattttgaggcatttcagtcagttgctcaatgtacctataaccagaccgttcagctggatattacggcctttttaaagaccgtaaagaaaaataagcacaagttttatccggcctttattcacattcttgcccgcctgatgaatgctcatccggaatttcgtatggcaatgaaagacggtgagctggtgatatgggatagtgttcacccttgttacaccgttttccatgagcaaactgaaacgttttcatccctctggagtgaataccacgacgatttccggcagtttctacacatatattcgcaagatgtggcgtgttacggtgaaaacctggcctatttccctaaagggtttattgagaatatgtttttcgtctcagccaatccctgggtgagtttcaccagttttgatttaaacgtggccaatatggacaacttcttcgcccccgttttcacgatgggcaaatattatacgcaaggcgacaaggtgctgatgccgctggcgattcaggttcatcatgccgtttgtgatggcttccatgtcggcagaatgcttaatgaattacaacagtactgtgatgagtggcagggcggggcgtaatttgatatcgagctcgcttggactcctgttgatagatccagtaatgacctcagaactccatctggatttgttcagaacgctcggttgccgccgggcgttttttattggtgagaatccaagcctctctagacttgaagactgacgtcgagacctacgaattcctgatccttcaactcagcaaaagttcgatttattcaacaaagccacgttgtgtctcaaaatctctgatgttacattgcacaagataaaaatatatcatcatgaacaataaaactgtctgcttacataaacagtaatacaaggggtgttatgagccatattcaacgggaaacgtcttgctccaggccgcgattaaattccaacatggatgctgatttatatgggtataaatgggctcgcgataatgtcgggcaatcaggtgcgacaatctatcgattgtatgggaagcccgatgcgccagagttgtttctgaaacatggcaaaggtagcgttgccaatgatgttacagatgagatggtcagactaaactggctgacggaatttatgcctcttccgaccatcaagcattttatccgtactcctgatgatgcatggttactcaccactgcgatccccgggaaaacagcattccaggtattagaagaatatcctgattcaggtgaaaatattgttgatgcgctggcagtgttcctgcgccggttgcattcgattcctgtttgtaattgtccttttaacagcgatcgcgtatttcgtctcgctcaggcgcaatcacgaatgaataacggtttggttgatgcgagtgattttgatgacgagcgtaatggctggcctgttgaacaagtctggaaagaaatgcataagcttttgccattctcaccggattcagtcgtcactcatggtgatttctcacttgataaccttatttttgacgaggggaaattaataggttgtattgatgttggacgagtcggaatcgcagaccgataccaggatcttgccatcctatggaactgcctcggtgagttttctccttcattacagaaacggctttttcaaaaatatggtattgataatcctgatatgaataaattgcagtttcatttgatgctcgatgagtttttctaatcagaattggttaattggttgtaacactggcagagcattacgctgacttgacgggagctagttcatgaccaaaatcccttaacgctcgaggtatcacgaggcagaatttcagataaaaaaaatccttagctttcgctaaggat

SEQ ID NO: 1403 - DNA, 4130 bp, synthetic construct
  misc_feature 1..4130: note = Description of Artificial Sequence: Synthetic polynucleotide
  source 1..4130: mol_type = other DNA
ggcgcgcctatgcgatggtctcaaggtgaaagtgaaacgtgatttcatgcgtcattttgaacattttgtaaatcttatttaataatgtgtgcggcaattcacatttaatttatgaatgttttcttaacatatcgcggcaactcaagaaacggcaggttcggatcttagctactagagattaaggaggtaaaaaaaatgagtgtgatcgctaaacaaatgacctacaaggtttatatgtcaggcacggtcaatggacactactttgaggtcgaaggtgatggaaaaggtaagccctacgagggggagcagacggtaaagctcactgtcaccaagggcggacctctgccatttgcttgggatattttatcaccacagtgtcagtacggaagcataccattcaccaagtaccctgaagatatccctgactatgtaaagcagtcattcccggagggctatacatgggagaggatcatgaactttgaagatggtgcagtgtgtactgtcagcaatgattccagcatccaaggcaactgtttcatctaccatgtcaagttctctggtttgaactttcctcccaatggacctgtcatgcagaagaaaacacagggctgggaacccaacactgagcgtctctttgcacgagatggaatgctgctaggaaacaactttatggctctgaagttagaaggaggcggtcactatttgtgtgaatttaaaactacttacaaggcaaagaagcctgtgaagatgccagggtatcactatgttgaccgcaaactggatgtaaccaatcacaacaaggattacacttcggttgagcagtgtgaaatttccattgcacgcaaacctgtggtcgcctaaggatctctccaaagcccgccgaaaggcgggcttttctgtaggtacgtcttcatcgctatcctgcaggcggatatcttcggaaaaaaaaaggcctgcgattaccagcaggcctgttgagatcgaggaaatctcgggatctagtcttgagctttgctcactcaaaggcggtaatgcggccgctagaaatattttatctgattaataagatgatcttcttgagatcgttttggtctgcgcgtaatctcttgctctgaaaacgaaaaaaccgccttgcagggcggtttttcgaaggttctctgagctaccaactctttgaaccgaggtaactggcttggaggagcgcagtcaccaaaacttgtcctttcagtttagccttaaccggcgcatgacttcaagactaactcctctaaatcaattaccagtggctgctgccagtggtgcttttgcatgtctttccgggttggactcaagacgatagttaccggataaggcgcagcggtcggactgaacggggggttcgtgcatacagtccagcttggagcgaactgcctacccggaactgagtgtcaggcgtggaatgagacaaacgcggccataacagcggaatgacaccggtaaaccgaaaggcaggaacaggagagcgcacgagggagccgccagggggaaacgcctggtatctttatagtcctgtcgggtttcgccaccactgatttgagcgtcagatttcgtgatgcttgtcaggggggcggagcctatggaaaaacggctttgccgcggccctctcacttccctgttaagtatcttcctggcatcttccaggaaatctccgccccgttcgtaagccatttccgctcgccgcagtcgaacgaccgagcgtagcgagtcagtgagcgaggaagcggaatatatcctgtatcacatattctgctgacgcaccggtgcagccttttttctcctgccacatgaagcacttcactgacaccctcatcagtgccaacatagtaagccagtatacactccgctagcgctgatgtccggcggtgcggtaccaggtggcacttttcggggaaatgtgcgcggaacccctatttgtttatttttctaaatacattcaaatatgtatccgctcatgagacaataaccctgataaatgcttcaataatattgaaaaaggaagagtatgagtattcaacatttccgtgtcgcccttattcccttttttgcggcattttgccttcctgtttttgctcacccagaaacgctggtgaaagtaaaagatgctgaagatcagttgggtgcacgagtgggttacatcgaactggatctcaacagcggtaagatccttgagagttttcgccccgaagaacgttttccaatgatgagcacttttaaagttctgctatgtggcgcggtattatcccgtattgacgccgggcaagagcaactcggtcgccgcatacactattctcagaatgacttggttgagtactcaccagtcacagaaaagcatcttacggatggcatgacagtaagagaattatgcagtgctgccataaccatgagtgataacactgcggccaacttacttctgacaacgatcggaggaccgaaggagctaaccgcttttttgcacaacatgggggatcatgtaactcgccttgatcgttgggaaccggagctgaatgaagccataccaaacgacgagcgtgacaccacgatgcctgtagcaatggcaacaacgttgcgcaaactattaactggcgaactacttactctagcttcccggcaacaattaatagactggatggaggcggataaagttgcaggaccacttctgcgctcggcccttccggctggctggtttattgctgataaatctggagccggtgagcgtgggtcgcgcggtatcattgcagcactggggccagatggtaagccctcccgtatcgtagttatctacacgacggggagtcaggcaactatggatgaacgaaatagacagatcgctgagataggtgcctcactgattaagcattggtaactgtcagaccaagtttactcatatatactttagattgatttaaaacttcatttttaatttaaaaggatctaggtgaagatcctttctagacttgaagactgacgtcgagacctacgaattcctgatccttcaactcagcaaaagttcgatttattcaacaaagccacgttgtgtctcaaaatctctgatgttacattgcacaagataaaaatatatcatcatgaacaataaaactgtctgcttacataaacagtaatacaaggggtgttatgagccatattcaacgggaaacgtcttgctccaggccgcgattaaattccaacatggatgctgatttatatgggtataaatgggctcgcgataatgtcgggcaatcaggtgcgacaatctatcgattgtatgggaagcccgatgcgccagagttgtttctgaaacatggcaaaggtagcgttgccaatgatgttacagatgagatggtcagactaaactggctgacggaatttatgcctcttccgaccatcaagcattttatccgtactcctgatgatgcatggttactcaccactgcgatccccgggaaaacagcattccaggtattagaagaatatcctgattcaggtgaaaatattgttgatgcgctggcagtgttcctgcgccggttgcattcgattcctgtttgtaattgtccttttaacagcgatcgcgtatttcgtctcgctcaggcgcaatcacgaatgaataacggtttggttgatgcgagtgattttgatgacgagcgtaatggctggcctgttgaacaagtctggaaagaaatgcataagcttttgccattctcaccggattcagtcgtcactcatggtgatttctcacttgataaccttatttttgacgaggggaaattaataggttgtattgatgttggacgagtcggaatcgcagaccgataccaggatcttgccatcctatggaactgcctcggtgagttttctccttcattacagaaacggctttttcaaaaatatggtattgataatcctgatatgaataaattgcagtttcatttgatgctcgatgagtttttctaatcagaattggttaattggttgtaacactggcagagcattacgctgacttgacgggagctagttcatgaccaaaatcccttaacgctcgaggtatcacgaggcagaatttcagataaaaaaaatccttagctttcgctaaggat

SEQ ID NO: 1404 - DNA, 3971 bp, synthetic construct
  misc_feature 1..3971: note = Description of Artificial Sequence: Synthetic polynucleotide
  source 1..3971: mol_type = other DNA
ggcgcgcctatgcgatggtctcaaggtgaaagtgaaacgtgatttcatgcgtcattttgaacattttgtaaatcttatttaataatgtgtgcggcaattcacatttaatttatgaatgttttcttaacatatcgcggcaactcaagaaacggcaggttcggatcttagctactagagattaaggaggtaaaaaaaatgagtgtgatcgctaaacaaatgacctacaaggtttatatgtcaggcacggtcaatggacactactttgaggtcgaaggtgatggaaaaggtaagccctacgagggggagcagacggtaaagctcactgtcaccaagggcggacctctgccatttgcttgggatattttatcaccacagtgtcagtacggaagcataccattcaccaagtaccctgaagatatccctgactatgtaaagcagtcattcccggagggctatacatgggagaggatcatgaactttgaagatggtgcagtgtgtactgtcagcaatgattccagcatccaaggcaactgtttcatctaccatgtcaagttctctggtttgaactttcctcccaatggacctgtcatgcagaagaaaacacagggctgggaacccaacactgagcgtctctttgcacgagatggaatgctgctaggaaacaactttatggctctgaagttagaaggaggcggtcactatttgtgtgaatttaaaactacttacaaggcaaagaagcctgtgaagatgccagggtatcactatgttgaccgcaaactggatgtaaccaatcacaacaaggattacacttcggttgagcagtgtgaaatttccattgcacgcaaacctgtggtcgcctaaggatctctccaaagcccgccgaaaggcgggcttttctgtaggtacgtcttcatcgctatcctgcaggcggatatcttcggaaaaaaaaaggcctgcgattaccagcaggcctgttgagatcgaggaaatctcgggatctagtcttgagctttgctcactcaaaggcggtaatgcggccgctagaaatattttatctgattaataagatgatcttcttgagatcgttttggtctgcgcgtaatctcttgctctgaaaacgaaaaaaccgccttgcagggcggtttttcgaaggttctctgagctaccaactctttgaaccgaggtaactggcttggaggagcgcagtcaccaaaacttgtcctttcagtttagccttaaccggcgcatgacttcaagactaactcctctaaatcaattaccagtggctgctgccagtggtgcttttgcatgtctttccgggttggactcaagacgatagttaccggataaggcgcagcggtcggactgaacggggggttcgtgcatacagtccagcttggagcgaactgcctacccggaactgagtgtcaggcgtggaatgagacaaacgcggccataacagcggaatgacaccggtaaaccgaaaggcaggaacaggagagcgcacgagggagccgccagggggaaacgcctggtatctttatagtcctgtcgggtttcgccaccactgatttgagcgtcagatttcgtgatgcttgtcaggggggcggagcctatggaaaaacggctttgccgcggccctctcacttccctgttaagtatcttcctggcatcttccaggaaatctccgccccgttcgtaagccatttccgctcgccgcagtcgaacgaccgagcgtagcgagtcagtgagcgaggaagcggaatatatcctgtatcacatattctgctgacgcaccggtgcagccttttttctcctgccacatgaagcacttcactgacaccctcatcagtgccaacatagtaagccagtatacactccgctagcgctgatgtccggcggtgcggtaccttgatcgggcacgtaagaggttccaactttcaccataatgaaataagatcactaccgggcgtattttttgagttatcgagattttcaggagctaaggaagctaaaatggagaaaaaaatcactggatataccaccgttgatatatcccaatggcatcgtaaagaacattttgaggcatttcagtcagttgctcaatgtacctataaccagaccgttcagctggatattacggcctttttaaagaccgtaaagaaaaataagcacaagttttatccggcctttattcacattcttgcccgcctgatgaatgctcatccggaatttcgtatggcaatgaaagacggtgagctggtgatatgggatagtgttcacccttgttacaccgttttccatgagcaaactgaaacgttttcatccctctggagtgaataccacgacgatttccggcagtttctacacatatattcgcaagatgtggcgtgttacggtgaaaacctggcctatttccctaaagggtttattgagaatatgtttttcgtctcagccaatccctgggtgagtttcaccagttttgatttaaacgtggccaatatggacaacttcttcgcccccgttttcacgatgggcaaatattatacgcaaggcgacaaggtgctgatgccgctggcgattcaggttcatcatgccgtttgtgatggcttccatgtcggcagaatgcttaatgaattacaacagtactgtgatgagtggcagggcggggcgtaatttgatatcgagctcgcttggactcctgttgatagatccagtaatgacctcagaactccatctggatttgttcagaacgctcggttgccgccgggcgttttttattggtgagaatccaagcctctctagacttgaagactgacgtcgagacctacgaattcaggtggcacttttcggggaaatgtgcgcggaacccctatttgtttatttttctaaatacattcaaatatgtatccgctcatgagacaataaccctgataaatgcttcaataatattgaaaaaggaagagtatgagtattcaacatttccgtgtcgcccttattcccttttttgcggcattttgccttcctgtttttgctcacccagaaacgctggtgaaagtaaaagatgctgaagatcagttgggtgcacgagtgggttacatcgaactggatctcaacagcggtaagatccttgagagttttcgccccgaagaacgttttccaatgatgagcacttttaaagttctgctatgtggcgcggtattatcccgtattgacgccgggcaagagcaactcggtcgccgcatacactattctcagaatgacttggttgagtactcaccagtcacagaaaagcatcttacggatggcatgacagtaagagaattatgcagtgctgccataaccatgagtgataacactgcggccaacttacttctgacaacgatcggaggaccgaaggagctaaccgcttttttgcacaacatgggggatcatgtaactcgccttgatcgttgggaaccggagctgaatgaagccataccaaacgacgagcgtgacaccacgatgcctgtagcaatggcaacaacgttgcgcaaactattaactggcgaactacttactctagcttcccggcaacaattaatagactggatggaggcggataaagttgcaggaccacttctgcgctcggcccttccggctggctggtttattgctgataaatctggagccggtgagcgtgggtcgcgcggtatcattgcagcactggggccagatggtaagccctcccgtatcgtagttatctacacgacggggagtcaggcaactatggatgaacgaaatagacagatcgctgagataggtgcctcactgattaagcattggtaactgtcagaccaagtttactcatatatactttagattgatttaaaacttcatttttaatttaaaaggatctaggtgaagatccttctcgaggtatcacgaggcagaatttcagataaaaaaaatccttagctttcgctaaggat

SEQ ID NO: 1405 - DNA, 4130 bp, synthetic construct
  misc_feature 1..4130: note = Description of Artificial Sequence: Synthetic polynucleotide
  source 1..4130: mol_type = other DNA
ggcgcgcctatgcgatggtctcaaggtgaaagtgaaacgtgatttcatgcgtcattttgaacattttgtaaatcttatttaataatgtgtgcggcaattcacatttaatttatgaatgttttcttaacatatcgcggcaactcaagaaacggcaggttcggatcttagctactagagattaaggaggtaaaaaaaatgagtgtgatcgctaaacaaatgacctacaaggtttatatgtcaggcacggtcaatggacactactttgaggtcgaaggtgatggaaaaggtaagccctacgagggggagcagacggtaaagctcactgtcaccaagggcggacctctgccatttgcttgggatattttatcaccacagtgtcagtacggaagcataccattcaccaagtaccctgaagatatccctgactatgtaaagcagtcattcccggagggctatacatgggagaggatcatgaactttgaagatggtgcagtgtgtactgtcagcaatgattccagcatccaaggcaactgtttcatctaccatgtcaagttctctggtttgaactttcctcccaatggacctgtcatgcagaagaaaacacagggctgggaacccaacactgagcgtctctttgcacgagatggaatgctgctaggaaacaactttatggctctgaagttagaaggaggcggtcactatttgtgtgaatttaaaactacttacaaggcaaagaagcctgtgaagatgccagggtatcactatgttgaccgcaaactggatgtaaccaatcacaacaaggattacacttcggttgagcagtgtgaaatttccattgcacgcaaacctgtggtcgcctaaggatctctccaaagcccgccgaaaggcgggcttttctgtaggtacgtcttcatcgctatcctgcaggcggatatcttcggaaaaaaaaaggcctgcgattaccagcaggcctgttgagatcgaggaaatctcgggatctagtcttgagctttgctcactcaaaggcggtaatgcggccgctagaaatattttatctgattaataagatgatcttcttgagatcgttttggtctgcgcgtaatctcttgctctgaaaacgaaaaaaccgccttgcagggcggtttttcgaaggttctctgagctaccaactctttgaaccgaggtaactggcttggaggagcgcagtcaccaaaacttgtcctttcagtttagccttaaccggcgcatgacttcaagactaactcctctaaatcaattaccagtggctgctgccagtggtgcttttgcatgtctttccgggttggactcaagacgatagttaccggataaggcgcagcggtcggactgaacggggggttcgtgcatacagtccagcttggagcgaactgcctacccggaactgagtgtcaggcgtggaatgagacaaacgcggccataacagcggaatgacaccggtaaaccgaaaggcaggaacaggagagcgcacgagggagccgccagggggaaacgcctggtatctttatagtcctgtcgggtttcgccaccactgatttgagcgtcagatttcgtgatgcttgtcaggggggcggagcctatggaaaaacggctttgccgcggccctctcacttccctgttaagtatcttcctggcatcttccaggaaatctccgccccgttcgtaagccatttccgctcgccgcagtcgaacgaccgagcgtagcgagtcagtgagcgaggaagcggaatatatcctgtatcacatattctgctgacgcaccggtgcagccttttttctcctgccacatgaagcacttcactgacaccctcatcagtgccaacatagtaagccagtatacactccgctagcgctgatgtccggcggtgcggtaccctgatccttcaactcagcaaaagttcgatttattcaacaaagccacgttgtgtctcaaaatctctgatgttacattgcacaagataaaaatatatcatcatgaacaataaaactgtctgcttacataaacagtaatacaaggggtgttatgagccatattcaacgggaaacgtcttgctccaggccgcgattaaattccaacatggatgctgatttatatgggtataaatgggctcgcgataatgtcgggcaatcaggtgcgacaatctatcgattgtatgggaagcccgatgcgccagagttgtttctgaaacatggcaaaggtagcgttgccaatgatgttacagatgagatggtcagactaaactggctgacggaatttatgcctcttccgaccatcaagcattttatccgtactcctgatgatgcatggttactcaccactgcgatccccgggaaaacagcattccaggtattagaagaatatcctgattcaggtgaaaatattgttgatgcgctggcagtgttcctgcgccggttgcattcgattcctgtttgtaattgtccttttaacagcgatcgcgtatttcgtctcgctcaggcgcaatcacgaatgaataacggtttggttgatgcgagtgattttgatgacgagcgtaatggctggcctgttgaacaagtctggaaagaaatgcataagcttttgccattctcaccggattcagtcgtcactcatggtgatttctcacttgataaccttatttttgacgaggggaaattaataggttgtattgatgttggacgagtcggaatcgcagaccgataccaggatcttgccatcctatggaactgcctcggtgagttttctccttcattacagaaacggctttttcaaaaatatggtattgataatcctgatatgaataaattgcagtttcatttgatgctcgatgagtttttctaatcagaattggttaattggttgtaacactggcagagcattacgctgacttgacgggagctagttcatgaccaaaatcccttaacgtctagacttgaagactgacgtcgagacctacgaattcaggtggcacttttcggggaaatgtgcgcggaacccctatttgtttatttttctaaatacattcaaatatgtatccgctcatgagacaataaccctgataaatgcttcaataatattgaaaaaggaagagtatgagtattcaacatttccgtgtcgcccttattcccttttttgcggcattttgccttcctgtttttgctcacccagaaacgctggtgaaagtaaaagatgctgaagatcagttgggtgcacgagtgggttacatcgaactggatctcaacagcggtaagatccttgagagttttcgccccgaagaacgttttccaatgatgagcacttttaaagttctgctatgtggcgcggtattatcccgtattgacgccgggcaagagcaactcggtcgccgcatacactattctcagaatgacttggttgagtactcaccagtcacagaaaagcatcttacggatggcatgacagtaagagaattatgcagtgctgccataaccatgagtgataacactgcggccaacttacttctgacaacgatcggaggaccgaaggagctaaccgcttttttgcacaacatgggggatcatgtaactcgccttgatcgttgggaaccggagctgaatgaagccataccaaacgacgagcgtgacaccacgatgcctgtagcaatggcaacaacgttgcgcaaactattaactggcgaactacttactctagcttcccggcaacaattaatagactggatggaggcggataaagttgcaggaccacttctgcgctcggcccttccggctggctggtttattgctgataaatctggagccggtgagcgtgggtcgcgcggtatcattgcagcactggggccagatggtaagccctcccgtatcgtagttatctacacgacggggagtcaggcaactatggatgaacgaaatagacagatcgctgagataggtgcctcactgattaagcattggtaactgtcagaccaagtttactcatatatactttagattgatttaaaacttcatttttaatttaaaaggatctaggtgaagatccttctcgaggtatcacgaggcagaatttcagataaaaaaaatccttagctttcgctaaggat

SEQ ID NO: 1406 - DNA, 3971 bp, synthetic construct
  misc_feature 1..3971: note = Description of Artificial Sequence: Synthetic polynucleotide
  source 1..3971: mol_type = other DNA
ggcgcgcctatgcgatggtctcaaggtgaaagtgaaacgtgatttcatgcgtcattttgaacattttgtaaatcttatttaataatgtgtgcggcaattcacatttaatttatgaatgttttcttaacatatcgcggcaactcaagaaacggcaggttcggatcttagctactagagattaaggaggtaaaaaaaatgagtgtgatcgctaaacaaatgacctacaaggtttatatgtcaggcacggtcaatggacactactttgaggtcgaaggtgatggaaaaggtaagccctacgagggggagcagacggtaaagctcactgtcaccaagggcggacctctgccatttgcttgggatattttatcaccacagtgtcagtacggaagcataccattcaccaagtaccctgaagatatccctgactatgtaaagcagtcattcccggagggctatacatgggagaggatcatgaactttgaagatggtgcagtgtgtactgtcagcaatgattccagcatccaaggcaactgtttcatctaccatgtcaagttctctggtttgaactttcctcccaatggacctgtcatgcagaagaaaacacagggctgggaacccaacactgagcgtctctttgcacgagatggaatgctgctaggaaacaactttatggctctgaagttagaaggaggcggtcactatttgtgtgaatttaaaactacttacaaggcaaagaagcctgtgaagatgccagggtatcactatgttgaccgcaaactggatgtaaccaatcacaacaaggattacacttcggttgagcagtgtgaaatttccattgcacgcaaacctgtggtcgcctaaggatctctccaaagcccgccgaaaggcgggcttttctgtaggtacgtcttcatcgctatcctgcaggcggatatcttcggaaaaaaaaaggcctgcgattaccagcaggcctgttgagatcgaggaaatctcgggatctagtcttgagctttgctcactcaaaggcggtaatgcggccgctagaaatattttatctgattaataagatgatcttcttgagatcgttttggtctgcgcgtaatctcttgctctgaaaacgaaaaaaccgccttgcagggcggtttttcgaaggttctctgagctaccaactctttgaaccgaggtaactggcttggaggagcgcagtcaccaaaacttgtcctttcagtttagccttaaccggcgcatgacttcaagactaactcctctaaatcaattaccagtggctgctgccagtggtgcttttgcatgtctttccgggttggactcaagacgatagttaccggataaggcgcagcggtcggactgaacggggggttcgtgcatacagtccagcttggagcgaactgcctacccggaactgagtgtcaggcgtggaatgagacaaacgcggccataacagcggaatgacaccggtaaaccgaaaggcaggaacaggagagcgcacgagggagccgccagggggaaacgcctggtatctttatagtcctgtcgggtttcgccaccactgatttgagcgtcagatttcgtgatgcttgtcaggggggcggagcctatggaaaaacggctttgccgcggccctctcacttccctgttaagtatcttcctggcatcttccaggaaatctccgccccgttcgtaagccatttccgctcgccgcagtcgaacgaccgagcgtagcgagtcagtgagcgaggaagcggaatatatcctgtatcacatattctgctgacgcaccggtgcagccttttttctcctgccacatgaagcacttcactgacaccctcatcagtgccaacatagtaagccagtatacactccgctagcgctgatgtccggcggtgcggtaccaggtggcacttttcggggaaatgtgcgcggaacccctatttgtttatttttctaaatacattcaaatatgtatccgctcatgagacaataaccctgataaatgcttcaataatattgaaaaaggaagagtatgagtattcaacatttccgtgtcgcccttattcccttttttgcggcattttgccttcctgtttttgctcacccagaaacgctggtgaaagtaaaagatgctgaagatcagttgggtgcacgagtgggttacatcgaactggatctcaacagcggtaagatccttgagagttttcgccccgaagaacgttttccaatgatgagcacttttaaagttctgctatgtggcgcggtattatcccgtattgacgccgggcaagagcaactcggtcgccgcatacactattctcagaatgacttggttgagtactcaccagtcacagaaaagcatcttacggatggcatgacagtaagagaattatgcagtgctgccataaccatgagtgataacactgcggccaacttacttctgacaacgatcggaggaccgaaggagctaaccgcttttttgcacaacatgggggatcatgtaactcgccttgatcgttgggaaccggagctgaatgaagccataccaaacgacgagcgtgacaccacgatgcctgtagcaatggcaacaacgttgcgcaaactattaactggcgaactacttactctagcttcccggcaacaattaatagactggatggaggcggataaagttgcaggaccacttctgcgctcggcccttccggctggctggtttattgctgataaatctggagccggtgagcgtgggtcgcgcggtatcattgcagcactggggccagatggtaagccctcccgtatcgtagttatctacacgacggggagtcaggcaactatggatgaacgaaatagacagatcgctgagataggtgcctcactgattaagcattggtaactgtcagaccaagtttactcatatatactttagattgatttaaaacttcatttttaatttaaaaggatctaggtgaagatcctttctagacttgaagactgacgtcgagacctacgaattcttgatcgggcacgtaagaggttccaactttcaccataatgaaataagatcactaccgggcgtattttttgagttatcgagattttcaggagctaaggaagctaaaatggagaaaaaaatcactggatataccaccgttgatatatcccaatggcatcgtaaagaacattttgaggcatttcagtcagttgctcaatgtacctataaccagaccgttcagctggatattacggcctttttaaagaccgtaaagaaaaataagcacaagttttatccggcctttattcacattcttgcccgcctgatgaatgctcatccggaatttcgtatggcaatgaaagacggtgagctggtgatatgggatagtgttcacccttgttacaccgttttccatgagcaaactgaaacgttttcatccctctggagtgaataccacgacgatttccggcagtttctacacatatattcgcaagatgtggcgtgttacggtgaaaacctggcctatttccctaaagggtttattgagaatatgtttttcgtctcagccaatccctgggtgagtttcaccagttttgatttaaacgtggccaatatggacaacttcttcgcccccgttttcacgatgggcaaatattatacgcaaggcgacaaggtgctgatgccgctggcgattcaggttcatcatgccgtttgtgatggcttccatgtcggcagaatgcttaatgaattacaacagtactgtgatgagtggcagggcggggcgtaatttgatatcgagctcgcttggactcctgttgatagatccagtaatgacctcagaactccatctggatttgttcagaacgctcggttgccgccgggcgttttttattggtgagaatccaagcctcctcgaggtatcacgaggcagaatttcagataaaaaaaatccttagctttcgctaaggat

SEQ ID NO: 1407 - DNA, 3944 bp, synthetic construct
  misc_feature 1..3944: note = Description of Artificial Sequence: Synthetic polynucleotide
  source 1..3944: mol_type = other DNA
ggcgcgcctatgcgatggtctcaaggtgaaagtgaaacgtgatttcatgcgtcattttgaacattttgtaaatcttatttaataatgtgtgcggcaattcacatttaatttatgaatgttttcttaacatatcgcggcaactcaagaaacggcaggttcggatcttagctactagagattaaggaggtaaaaaaaatgagtgtgatcgctaaacaaatgacctacaaggtttatatgtcaggcacggtcaatggacactactttgaggtcgaaggtgatggaaaaggtaagccctacgagggggagcagacggtaaagctcactgtcaccaagggcggacctctgccatttgcttgggatattttatcaccacagtgtcagtacggaagcataccattcaccaagtaccctgaagatatccctgactatgtaaagcagtcattcccggagggctatacatgggagaggatcatgaactttgaagatggtgcagtgtgtactgtcagcaatgattccagcatccaaggcaactgtttcatctaccatgtcaagttctctggtttgaactttcctcccaatggacctgtcatgcagaagaaaacacagggctgggaacccaacactgagcgtctctttgcacgagatggaatgctgctaggaaacaactttatggctctgaagttagaaggaggcggtcactatttgtgtgaatttaaaactacttacaaggcaaagaagcctgtgaagatgccagggtatcactatgttgaccgcaaactggatgtaaccaatcacaacaaggattacacttcggttgagcagtgtgaaatttccattgcacgcaaacctgtggtcgcctaaggatctctccaaagcccgccgaaaggcgggcttttctgtaggtacgtcttcatcgctatcctgcaggcggatatcttcggaaaaaaaaaggcctgcgattaccagcaggcctgttgagatcgaggaaatctcgggatctagtcttgagctttgctcactcaaaggcggtaatgcggccgctagaaatattttatctgattaataagatgatcttcttgagatcgttttggtctgcgcgtaatctcttgctctgaaaacgaaaaaaccgccttgcagggcggtttttcgaaggttctctgagctaccaactctttgaaccgaggtaactggcttggaggagcgcagtcaccaaaacttgtcctttcagtttagccttaaccggcgcatgacttcaagactaactcctctaaatcaattaccagtggctgctgccagtggtgcttttgcatgtctttccgggttggactcaagacgatagttaccggataaggcgcagcggtcggactgaacggggggttcgtgcatacagtccagcttggagcgaactgcctacccggaactgagtgtcaggcgtggaatgagacaaacgcggccataacagcggaatgacaccggtaaaccgaaaggcaggaacaggagagcgcacgagggagccgccagggggaaacgcctggtatctttatagtcctgtcgggtttcgccaccactgatttgagcgtcagatttcgtgatgcttgtcaggggggcggagcctatggaaaaacggctttgccgcggccctctcacttccctgttaagtatcttcctggcatcttccaggaaatctccgccccgttcgtaagccatttccgctcgccgcagtcgaacgaccgagcgtagcgagtcagtgagcgaggaagcggaatatatcctgtatcacatattctgctgacgcaccggtgcagccttttttctcctgccacatgaagcacttcactgacaccctcatcagtgccaacatagtaagccagtatacactccgctagcgctgatgtccggcggtgcggtaccctgatccttcaactcagcaaaagttcgatttattcaacaaagccacgttgtgtctcaaaatctctgatgttacattgcacaagataaaaatatatcatcatgaacaataaaactgtctgcttacataaacagtaatacaaggggtgttatgagccatattcaacgggaaacgtcttgctccaggccgcgattaaattccaacatggatgctgatttatatgggtataaatgggctcgcgataatgtcgggcaatcaggtgcgacaatctatcgattgtatgggaagcccgatgcgccagagttgtttctgaaacatggcaaaggtagcgttgccaatgatgttacagatgagatggtcagactaaactggctgacggaatttatgcctcttccgaccatcaagcattttatccgtactcctgatgatgcatggttactcaccactgcgatccccgggaaaacagcattccaggtattagaagaatatcctgattcaggtgaaaatattgttgatgcgctggcagtgttcctgcgccggttgcattcgattcctgtttgtaattgtccttttaacagcgatcgcgtatttcgtctcgctcaggcgcaatcacgaatgaataacggtttggttgatgcgagtgattttgatgacgagcgtaatggctggcctgttgaacaagtctggaaagaaatgcataagcttttgccattctcaccggattcagtcgtcactcatggtgatttctcacttgataaccttatttttgacgaggggaaattaataggttgtattgatgttggacgagtcggaatcgcagaccgataccaggatcttgccatcctatggaactgcctcggtgagttttctccttcattacagaaacggctttttcaaaaatatggtattgataatcctgatatgaataaattgcagtttcatttgatgctcgatgagtttttctaatcagaattggttaattggttgtaacactggcagagcattacgctgacttgacgggagctagttcatgaccaaaatcccttaacgtctagacttgaagactgacgtcgagacctacgaattcttgatcgggcacgtaagaggttccaactttcaccataatgaaataagatcactaccgggcgtattttttgagttatcgagattttcaggagctaaggaagctaaaatggagaaaaaaatcactggatataccaccgttgatatatcccaatggcatcgtaaagaacattttgaggcatttcagtcagttgctcaatgtacctataaccagaccgttcagctggatattacggcctttttaaagaccgtaaagaaaaataagcacaagttttatccggcctttattcacattcttgcccgcctgatgaatgctcatccggaatttcgtatggcaatgaaagacggtgagctggtgatatgggatagtgttcacccttgttacaccgttttccatgagcaaactgaaacgttttcatccctctggagtgaataccacgacgatttccggcagtttctacacatatattcgcaagatgtggcgtgttacggtgaaaacctggcctatttccctaaagggtttattgagaatatgtttttcgtctcagccaatccctgggtgagtttcaccagttttgatttaaacgtggccaatatggacaacttcttcgcccccgttttcacgatgggcaaatattatacgcaaggcgacaaggtgctgatgccgctggcgattcaggttcatcatgccgtttgtgatggcttccatgtcggcagaatgcttaatgaattacaacagtactgtgatgagtggcagggcggggcgtaatttgatatcgagctcgcttggactcctgttgatagatccagtaatgacctcagaactccatctggatttgttcagaacgctcggttgccgccgggcgttttttattggtgagaatccaagcctcctcgaggtatcacgaggcagaatttcagataaaaaaaatccttagctttcgctaaggat

SEQ ID NO: 1408 - DNA, 3324 bp, synthetic construct
  misc_feature 1..3324: note = Description of Artificial Sequence: Synthetic polynucleotide
  source 1..3324: mol_type = other DNA
ggcgcgccgaaacgatgagatttccttcaatttttactgctgttttattcgcagcatcctccgcattagctgctccagtcaacactacaacagaagatgaaacggcacaaattccggctgaagctgtcatcggttactcagatttagaaggggatttcgatgttgctgttttgccattttccaacagcacaaataacgggttattgtttataaatactactattgccagcattgctgctaaagaagaaggggtatctctcgagaaaagagaggctgaagcaggtacgtcttcatcgctatcctgcaggcggatatcttcggaaaaaaaaaggcctgcgattaccagcaggcctgttgagatcgaggaaatctcgggatctagtcttgagctttgctcactcaaaggcggtaatgcggccgctagaaatattttatctgattaataagatgatcttcttgagatcgttttggtctgcgcgtaatctcttgctctgaaaacgaaaaaaccgccttgcagggcggtttttcgaaggttctctgagctaccaactctttgaaccgaggtaactggcttggaggagcgcagtcaccaaaacttgtcctttcagtttagccttaaccggcgcatgacttcaagactaactcctctaaatcaattaccagtggctgctgccagtggtgcttttgcatgtctttccgggttggactcaagacgatagttaccggataaggcgcagcggtcggactgaacggggggttcgtgcatacagtccagcttggagcgaactgcctacccggaactgagtgtcaggcgtggaatgagacaaacgcggccataacagcggaatgacaccggtaaaccgaaaggcaggaacaggagagcgcacgagggagccgccagggggaaacgcctggtatctttatagtcctgtcgggtttcgccaccactgatttgagcgtcagatttcgtgatgcttgtcaggggggcggagcctatggaaaaacggctttgccgcggccctctcacttccctgttaagtatcttcctggcatcttccaggaaatctccgccccgttcgtaagccatttccgctcgccgcagtcgaacgaccgagcgtagcgagtcagtgagcgaggaagcggaatatatcctgtatcacatattctgctgacgcaccggtgcagccttttttctcctgccacatgaagcacttcactgacaccctcatcagtgccaacatagtaagccagtatacactccgctagcgctgatgtccggcggtgcggtaccttgatcgggcacgtaagaggttccaactttcaccataatgaaataagatcactaccgggcgtattttttgagttatcgagattttcaggagctaaggaagctaaaatggagaaaaaaatcactggatataccaccgttgatatatcccaatggcatcgtaaagaacattttgaggcatttcagtcagttgctcaatgtacctataaccagaccgttcagctggatattacggcctttttaaagaccgtaaagaaaaataagcacaagttttatccggcctttattcacattcttgcccgcctgatgaatgctcatccggaatttcgtatggcaatgaaagacggtgagctggtgatatgggatagtgttcacccttgttacaccgttttccatgagcaaactgaaacgttttcatccctctggagtgaataccacgacgatttccggcagtttctacacatatattcgcaagatgtggcgtgttacggtgaaaacctggcctatttccctaaagggtttattgagaatatgtttttcgtctcagccaatccctgggtgagtttcaccagttttgatttaaacgtggccaatatggacaacttcttcgcccccgttttcacgatgggcaaatattatacgcaaggcgacaaggtgctgatgccgctggcgattcaggttcatcatgccgtttgtgatggcttccatgtcggcagaatgcttaatgaattacaacagtactgtgatgagtggcagggcggggcgtaatttgatatcgagctcgcttggactcctgttgatagatccagtaatgacctcagaactccatctggatttgttcagaacgctcggttgccgccgggcgttttttattggtgagaatccaagcctctctagacttgaagactgacgtcgagacctacgaattcctgatccttcaactcagcaaaagttcgatttattcaacaaagccacgttgtgtctcaaaatctctgatgttacattgcacaagataaaaatatatcatcatgaacaataaaactgtctgcttacataaacagtaatacaaggggtgttatgagccatattcaacgggaaacgtcttgctccaggccgcgattaaattccaacatggatgctgatttatatgggtataaatgggctcgcgataatgtcgggcaatcaggtgcgacaatctatcgattgtatgggaagcccgatgcgccagagttgtttctgaaacatggcaaaggtagcgttgccaatgatgttacagatgagatggtcagactaaactggctgacggaatttatgcctcttccgaccatcaagcattttatccgtactcctgatgatgcatggttactcaccactgcgatccccgggaaaacagcattccaggtattagaagaatatcctgattcaggtgaaaatattgttgatgcgctggcagtgttcctgcgccggttgcattcgattcctgtttgtaattgtccttttaacagcgatcgcgtatttcgtctcgctcaggcgcaatcacgaatgaataacggtttggttgatgcgagtgattttgatgacgagcgtaatggctggcctgttgaacaagtctggaaagaaatgcataagcttttgccattctcaccggattcagtcgtcactcatggtgatttctcacttgataaccttatttttgacgaggggaaattaataggttgtattgatgttggacgagtcggaatcgcagaccgataccaggatcttgccatcctatggaactgcctcggtgagttttctccttcattacagaaacggctttttcaaaaatatggtattgataatcctgatatgaataaattgcagtttcatttgatgctcgatgagtttttctaatcagaattggttaattggttgtaacactggcagagcattacgctgacttgacgggagctagttcatgaccaaaatcccttaacgctcgaggtatcacgaggcagaatttcagataaaaaaaatccttagctttcgctaaggat

SEQ ID NO: 1409 - protein, 25 aa, synthetic construct
  REGION 1..25: note = Description of Artificial Sequence: Synthetic peptide
GDYKDDDDKDYKDDDDKDYKDDDDK

SEQ ID NO: 1410 - DNA, 81 bp, synthetic construct
  misc_feature 1..81: note = Description of Artificial Sequence: Synthetic oligonucleotide
  source 1..81: mol_type = other DNA
ggtgactacaaagatgacgacgataaagattacaaagacgatgacgataaggactataaagatgatgacgacaaataataa

SEQ ID NO: 1411 - protein, 798 aa, synthetic construct
  REGION 1..798: note = Description of Artificial Sequence: Synthetic polypeptide
MRFPSIFTAVLFAASSALAAPVNTTTEDETAQIPAEAVIGYSDLEGDFDVAVLPFSNSTNNGLLFINTTIASIAAKEEGVSLEKREAEAGVLNAGNASALAGSFARALSASAESQSFAQSQAYQQASAFQQAAAQSAAQSASRAGSTSSSTTTTTSGATSQAASQSASSSYSSAFAQAASSSLATSSAISRAFASVSSASAASSLAYNIGLSAARSLGIASDTALAGALAQAVGGVGAGASASAYANAIARAAGQFLATQGVLNAGNASALAGSFARALSASAESQSFAQSQAYQQASAFQQAAAQSAAQSASRAGSTSSSTTTTTSGATSQAASQSASSSYSSAFAQAASSSLATSSAISRAFASVSSASAASSLAYNIGLSAARSLGIASDTALAGALAQAVGGVGAGASASAYANAIARAAGQFLATQGVLNAGNASALAGSFARALSASAESQSFAQSQAYQQASAFQQAAAQSAAQSASRAGSTSSSTTTTTSGATSQAASQSASSSYSSAFAQAASSSLATSSAISRAFASVSSASAASSLAYNIGLSAARSLGIASDTALAGALAQAVGGVGAGASASAYANAIARAAGQFLATQGVLNAGNASALAGSFARALSASAESQSFAQSQAYQQASAFQQAAAQSAAQSASRAGSTSSSTTTTTSGATSQAASQSASSSYSSAFAQAASSSLATSSAISRAFASVSSASAASSLAYNIGLSAARSLGIASDTALAGALAQAVGGVGAGASASAYANAIARAAGQFLATQGDYKDDDDKDYKDDDDKDYKDDDDK

SEQ ID NO: 1412 - protein, 946 aa, synthetic construct
  REGION 1..946: note = Description of Artificial Sequence: Synthetic polypeptide
MRFPSIFTAVLFAASSALAAPVNTTTEDETAQIPAEAVIGYSDLEGDFDVAVLPFSNSTNNGLLFINTTIASIAAKEEGVSLEKREAEAGINVDSDIGSVTSLILSGSTLQMTIPAGGDDLSGGYPGGFPAGAQPSGGAPVDFGGPSAGGDVAAKLARSLASTLASSGVFRAAFNSRVSTPVAVQFTDALVQKIASNLGLDYATASKLRKASQAVSKVRMGSDTNAYALAISSALAEVLSSSGKVADANINQIAPQLASGIVLGVSTTAPQFGVDLSSINVNLDISNVARNMQASIQGINVDSDIGSVTSLILSGSTLQMTIPAGGDDLSGGYPGGFPAGAQPSGGAPVDFGGPSAGGDVAAKLARSLASTLASSGVFRAAFNSRVSTPVAVQFTDALVQKIASNLGLDYATASKLRKASQAVSKVRMGSDTNAYALAISSALAEVLSSSGKVADANINQIAPQLASGIVLGVSTTAPQFGVDLSSINVNLDISNVARNMQASIQGINVDSDIGSVTSLILSGSTLQMTIPAGGDDLSGGYPGGFPAGAQPSGGAPVDFGGPSAGGDVAAKLARSLASTLASSGVFRAAFNSRVSTPVAVQFTDALVQKIASNLGLDYATASKLRKASQAVSKVRMGSDTNAYALAISSALAEVLSSSGKVADANINQIAPQLASGIVLGVSTTAPQFGVDLSSINVNLDISNVARNMQASIQGINVDSDIGSVTSLILSGSTLQMTIPAGGDDLSGGYPGGFPAGAQPSGGAPVDFGGPSAGGDVAAKLARSLASTLASSGVFRAAFNSRVSTPVAVQFTDALVQKIASNLGLDYATASKLRKASQAVSKVRMGSDTNAYALAISSALAEVLSSSGKVADANINQIAPQLASGIVLGVSTTAPQFGVDLSSINVNLDISNVARNMQASIQGDYKDDDDKDYKDDDDKDYKDDDDK

SEQ ID NO: 1413 - protein, 790 aa, synthetic construct
  REGION 1..790: note = Description of Artificial Sequence: Synthetic polypeptide
MRFPSIFTAVLFAASSALAAPVNTTTEDETAQIPAEAVIGYSDLEGDFDVAVLPFSNSTNNGLLFINTTIASIAAKEEGVSLEKREAEAGAAATSSSTSGASASSISSTTASSSSTGASSAAAGASHGAASAGGAFDFTRALFSELLESKIFSATTANFHSSTTASETLYATILKCLRELHFRYDECLQGATEVVSDLSVVSVGSGVHNYARVIAAFFERFFRKHDIPLSANYASRVAQYLISAMGSSVASADASSSSGAAATSSSTSGASASSISSTTASSSSTGASSAAAGASHGAASAGGAFDFTRALFSELLESKIFSATTANFHSSTTASETLYATILKCLRELHFRYDECLQGATEVVSDLSVVSVGSGVHNYARVIAAFFERFFRKHDIPLSANYASRVAQYLISAMGSSVASADASSSSGAAATSSSTSGASASSISSTTASSSSTGASSAAAGASHGAASAGGAFDFTRALFSELLESKIFSATTANFHSSTTASETLYATILKCLRELHFRYDECLQGATEVVSDLSVVSVGSGVHNYARVIAAFFERFFRKHDIPLSANYASRVAQYLISAMGSSVASADASSSSGAAATSSSTSGASASSISSTTASSSSTGASSAAAGASHGAASAGGAFDFTRALFSELLESKIFSATTANFHSSTTASETLYATILKCLRELHFRYDECLQGATEVVSDLSVVSVGSGVHNYARVIAAFFERFFRKHDIPLSANYASRVAQYLISAMGSSVASADASSSSGDYKDDDDKDYKDDDDKDYKDDDDK

SEQ ID NO: 1414 - protein, 978 aa, synthetic construct
  REGION 1..978: note = Description of Artificial Sequence: Synthetic polypeptide
MRFPSIFTAVLFAASSALAAPVNTTTEDETAQIPAEAVIGYSDLEGDFDVAVLPFSNSTNNGLLFINTTIASIAAKEEGVSLEKREAEAGAGAGGAGGYAQGYGAGAGAGAGAGTGAGGAGGYGQGYGAGSGAGAGGAGGYGAGAGAGAGAGDASGYGQGYGDGAGAGAGAAAAAGAAAGARGAGGYGGGAGAGAGAGAGAAGGYGQGYGAGAGEGAGAGAGAGAVAGAGAAAAAGAGAGAGGAEGYGAGAGAGGAGGYGQSYGDGAAAAAGSGAGAGGSGGYGAGAGAGSGAGAAGGYGGGAGAGAGAGGAGGYAQGYGAGAGAGAGAGTGAGGAGGYGQGYGAGSGAGAGGAGGYGAGAGAGAGAGDASGYGQGYGDGAGAGAGAAAAAGAAAGARGAGGYGGGAGAGAGAGAGAAGGYGQGYGAGAGEGAGAGAGAGAVAGAGAAAAAGAGAGAGGAEGYGAGAGAGGAGGYGQSYGDGAAAAAGSGAGAGGSGGYGAGAGAGSGAGAAGGYGGGAGAGAGAGGAGGYAQGYGAGAGAGAGAGTGAGGAGGYGQGYGAGSGAGAGGAGGYGAGAGAGAGAGDASGYGQGYGDGAGAGAGAAAAAGAAAGARGAGGYGGGAGAGAGAGAGAAGGYGQGYGAGAGEGAGAGAGAGAVAGAGAAAAAGAGAGAGGAEGYGAGAGAGGAGGYGQSYGDGAAAAAGSGAGAGGSGGYGAGAGAGSGAGAAGGYGGGAGAGAGAGGAGGYAQGYGAGAGAGAGAGTGAGGAGGYGQGYGAGSGAGAGGAGGYGAGAGAGAGAGDASGYGQGYGDGAGAGAGAAAAAGAAAGARGAGGYGGGAGAGAGAGAGAAGGYGQGYGAGAGEGAGAGAGAGAVAGAGAAAAAGAGAGAGGAEGYGAGAGAGGAGGYGQSYGDGAAAAAGSGAGAGGSGGYGAGAGAGSGAGAAGGYGGGAGAGDYKDDDDKDYKDDDDKDYKDDDDK

SEQ ID NO: 1415 - protein, 974 aa, synthetic construct
  REGION 1..974: note = Description of Artificial Sequence: Synthetic polypeptide
MRFPSIFTAVLFAASSALAAPVNTTTEDETAQIPAEAVIGYSDLEGDFDVAVLPFSNSTNNGLLFINTTIASIAAKEEGVSLEKREAEAGSSAGLVSRVANALANTSTLRAVLRRGVSQQTASSVVQRAVQSLAGTLGVDGNSLSRIALQAISQLPGGSDTSAYAQAFSSALFNAGVLNASNIDTLGSRVLSAVLNGVSSAAQGIGLNVDTGSVQSDISSSSSFLSSSSSSASFSQTSASSTSGAGYTAPAGPSGYTGPSGPSGYTGPVGGAAQFGSVSGQTSFGQTSGFTASTGGQAAFGATSGSSAGLVSRVANALANTSTLRAVLRRGVSQQTASSVVQRAVQSLAGTLGVDGNSLSRIALQAISQLPGGSDTSAYAQAFSSALFNAGVLNASNIDTLGSRVLSAVLNGVSSAAQGIGLNVDTGSVQSDISSSSSFLSSSSSSASFSQTSASSTSGAGYTAPAGPSGYTGPSGPSGYTGPVGGAAQFGSVSGQTSFGQTSGFTASTGGQAAFGATSGSSAGLVSRVANALANTSTLRAVLRRGVSQQTASSVVQRAVQSLAGTLGVDGNSLSRIALQAISQLPGGSDTSAYAQAFSSALFNAGVLNASNIDTLGSRVLSAVLNGVSSAAQGIGLNVDTGSVQSDISSSSSFLSSSSSSASFSQTSASSTSGAGYTAPAGPSGYTGPSGPSGYTGPVGGAAQFGSVSGQTSFGQTSGFTASTGGQAAFGATSGSSAGLVSRVANALANTSTLRAVLRRGVSQQTASSVVQRAVQSLAGTLGVDGNSLSRIALQAISQLPGGSDTSAYAQAFSSALFNAGVLNASNIDTLGSRVLSAVLNGVSSAAQGIGLNVDTGSVQSDISSSSSFLSSSSSSASFSQTSASSTSGAGYTAPAGPSGYTGPSGPSGYTGPVGGAAQFGSVSGQTSFGQTSGFTASTGGQAAFGATSGDYKDDDDKDYKDDDDKDYKDDDDK

SEQ ID NO: 1416 - protein, 834 aa, synthetic construct
  REGION 1..834: note = Description of Artificial Sequence: Synthetic polypeptide
MRFPSIFTAVLFAASSALAAPVNTTTEDETAQIPAEAVIGYSDLEGDFDVAVLPFSNSTNNGLLFINTTIASIAAKEEGVSLEKREAEAGSLASSFASALSASAASVASSAAAQAASQSQAAASAFSRAASQSASQSAARSGAQSSSTTTTTSTAGSQAASQFASSAASQASASSFARASSASLAASSSFSSAFSSANSLSALGNVGYQLGFNVANNLGISNAAGLGNALSQAVSSVGVGASSSSYANAVSNAVGQFLAGQGILNAANAGSLASSFASALSASAASVASSAAAQAASQSQAAASAFSRAASQSASQSAARSGAQSSSTTTTTSTAGSQAASQFASSAASQASASSFARASSASLAASSSFSSAFSSANSLSALGNVGYQLGFNVANNLGISNAAGLGNALSQAVSSVGVGASSSSYANAVSNAVGQFLAGQGILNAANAGSLASSFASALSASAASVASSAAAQAASQSQAAASAFSRAASQSASQSAARSGAQSSSTTTTTSTAGSQAASQFASSAASQASASSFARASSASLAASSSFSSAFSSANSLSALGNVGYQLGFNVANNLGISNAAGLGNALSQAVSSVGVGASSSSYANAVSNAVGQFLAGQGILNAANAGSLASSFASALSASAASVASSAAAQAASQSQAAASAFSRAASQSASQSAARSGAQSSSTTTTTSTAGSQAASQFASSAASQASASSFARASSASLAASSSFSSAFSSANSLSALGNVGYQLGFNVANNLGISNAAGLGNALSQAVSSVGVGASSSSYANAVSNAVGQFLAGQGILNAANAGDYKDDDDKDYKDDDDKDYKDDDDK

SEQ ID NO: 1417 - protein, 830 aa, synthetic construct
  REGION 1..830: note = Description of Artificial Sequence: Synthetic polypeptide
MRFPSIFTAVLFAASSALAAPVNTTTEDETAQIPAEAVIGYSDLEGDFDVAVLPFSNSTNNGLLFINTTIASIAAKEEGVSLEKREAEAGASSTTTATSESGITASSVATGAAAAISKTAAGSSSITYLARSFSRSLVSYLLQSAEFHSVFYSGISSGIASHIASTAGTSTAESLDLASLKSVIATACGKAMAATNSDGGPHAFANSLGSAITAVLIENAILTSENYDYFAKEFAHIFSISASKVVSATSAKSASEATSASWTAASRTGASSTTTATSESGITASSVATGAAAAISKTAAGSSSITYLARSFSRSLVSYLLQSAEFHSVFYSGISSGIASHIASTAGTSTAESLDLASLKSVIATACGKAMAATNSDGGPHAFANSLGSAITAVLIENAILTSENYDYFAKEFAHIFSISASKVVSATSAKSASEATSASWTAASRTGASSTTTATSESGITASSVATGAAAAISKTAAGSSSITYLARSFSRSLVSYLLQSAEFHSVFYSGISSGIASHIASTAGTSTAESLDLASLKSVIATACGKAMAATNSDGGPHAFANSLGSAITAVLIENAILTSENYDYFAKEFAHIFSISASKVVSATSAKSASEATSASWTAASRTGASSTTTATSESGITASSVATGAAAAISKTAAGSSSITYLARSFSRSLVSYLLQSAEFHSVFYSGISSGIASHIASTAGTSTAESLDLASLKSVIATACGKAMAATNSDGGPHAFANSLGSAITAVLIENAILTSENYDYFAKEFAHIFSISASKVVSATSAKSASEATSASWTAASRTGDYKDDDDKDYKDDDDKDYKDDDDK

SEQ ID NO: 1418 - protein, 710 aa, synthetic construct
  REGION 1..710: note = Description of Artificial Sequence: Synthetic polypeptide
MRFPSIFTAVLFAASSALAAPVNTTTEDETAQIPAEAVIGYSDLEGDFDVAVLPFSNSTNNGLLFINTTIASIAAKEEGVSLEKREAEAGGGYGRGQGAGAGVGAGAGAAAGAAAIARAGGYGQGAGGYGQGQGAGAAAGAAAGAGAGGYGQGAGGYGRGQGAGAGAGAGAGARGYGQGAGAGAAAGAAASAGAGGYGQGAGGYGQGQGAGAAAGAAASAGAGGYGQGAGGYGQGQGAGGGYGRGQGAGAGVGAGAGAAAGAAAIARAGGYGQGAGGYGQGQGAGAAAGAAAGAGAGGYGQGAGGYGRGQGAGAGAGAGAGARGYGQGAGAGAAAGAAASAGAGGYGQGAGGYGQGQGAGAAAGAAASAGAGGYGQGAGGYGQGQGAGGGYGRGQGAGAGVGAGAGAAAGAAAIARAGGYGQGAGGYGQGQGAGAAAGAAAGAGAGGYGQGAGGYGRGQGAGAGAGAGAGARGYGQGAGAGAAAGAAASAGAGGYGQGAGGYGQGQGAGAAAGAAASAGAGGYGQGAGGYGQGQGAGGGYGRGQGAGAGVGAGAGAAAGAAAIARAGGYGQGAGGYGQGQGAGAAAGAAAGAGAGGYGQGAGGYGRGQGAGAGAGAGAGARGYGQGAGAGAAAGAAASAGAGGYGQGAGGYGQGQGAGAAAGAAASAGAGGYGQGAGGYGQGQGAGDYKDDDDKDYKDDDDKDYKDDDDK

SEQ ID NO: 1419 - protein, 926 aa, synthetic construct
  REGION 1..926: note = Description of Artificial Sequence: Synthetic polypeptide
MRFPSIFTAVLFAASSALAAPVNTTTEDETAQIPAEAVIGYSDLEGDFDVAVLPFSNSTNNGLLFINTTIASIAAKEEGVSLEKREAEAGGGVGSLTGQTSFGQTSGFTSTAGAQGGFGPTTGAQSALISRIANALANTSTLRSVLRTGVSQQTASSVVQRAIQTLASNLGIDGNNLSRIALQAISQVPAGSDTSAYAQAFSTALVTGGVLNANNVDTLGSQVLSAVLNGVSSAAQGLGINVDTGSVQSDIRSSSSSLSTSSSSASFSQTSGAASTTGFTGAGGYPGGAGPLGGGVGSLTGQTSFGQTSGFTSTAGAQGGFGPTTGAQSALISRIANALANTSTLRSVLRTGVSQQTASSVVQRAIQTLASNLGIDGNNLSRIALQAISQVPAGSDTSAYAQAFSTALVTGGVLNANNVDTLGSQVLSAVLNGVSSAAQGLGINVDTGSVQSDIRSSSSSLSTSSSSASFSQTSGAASTTGFTGAGGYPGGAGPLGGGVGSLTGQTSFGQTSGFTSTAGAQGGFGPTTGAQSALISRIANALANTSTLRSVLRTGVSQQTASSVVQRAIQTLASNLGIDGNNLSRIALQAISQVPAGSDTSAYAQAFSTALVTGGVLNANNVDTLGSQVLSAVLNGVSSAAQGLGINVDTGSVQSDIRSSSSSLSTSSSSASFSQTSGAASTTGFTGAGGYPGGAGPLGGGVGSLTGQTSFGQTSGFTSTAGAQGGFGPTTGAQSALISRIANALANTSTLRSVLRTGVSQQTASSVVQRAIQTLASNLGIDGNNLSRIALQAISQVPAGSDTSAYAQAFSTALVTGGVLNANNVDTLGSQVLSAVLNGVSSAAQGLGINVDTGSVQSDIRSSSSSLSTSSSSASFSQTSGAASTTGFTGAGGYPGGAGPLGDYKDDDDKDYKDDDDKDYKDDDDK

SEQ ID NO: 1420 - protein, 834 aa, synthetic construct
  REGION 1..834: note = Description of Artificial Sequence: Synthetic polypeptide
MRFPSIFTAVLFAASSALAAPVNTTTEDETAQIPAEAVIGYSDLEGDFDVAVLPFSNSTNNGLLFINTTIASIAAKEEGVSLEKREAEAGSLASSFASALSASAASVASSAAAQSASQSQAAASAFSRAASQSASQSAARSGAQSSSTTTTTSASGSQAASQSASSAASQASASSFAQASSASLAASSSFSSAFSSANSLSALGNVAYQLGFNVANTLGIGNAPGLGAALSQAVSSVGVGASSSTYANVVSNAVGQFLAGQGVLNAANAGSLASSFASALSASAASVASSAAAQSASQSQAAASAFSRAASQSASQSAARSGAQSSSTTTTTSASGSQAASQSASSAASQASASSFAQASSASLAASSSFSSAFSSANSLSALGNVAYQLGFNVANTLGIGNAPGLGAALSQAVSSVGVGASSSTYANVVSNAVGQFLAGQGVLNAANAGSLASSFASALSASAASVASSAAAQSASQSQAAASAFSRAASQSASQSAARSGAQSSSTTTTTSASGSQAASQSASSAASQASASSFAQASSASLAASSSFSSAFSSANSLSALGNVAYQLGFNVANTLGIGNAPGLGAALSQAVSSVGVGASSSTYANVVSNAVGQFLAGQGVLNAANAGSLASSFASALSASAASVASSAAAQSASQSQAAASAFSRAASQSASQSAARSGAQSSSTTTTTSASGSQAASQSASSAASQASASSFAQASSASLAASSSFSSAFSSANSLSALGNVAYQLGFNVANTLGIGNAPGLGAALSQAVSSVGVGASSSTYANVVSNAVGQFLAGQGVLNAANAGDYKDDDDKDYKDDDDKDYKDDDDK

SEQ ID NO: 1421 - protein, 834 aa, synthetic construct
  REGION 1..834: note = Description of Artificial Sequence: Synthetic polypeptide
MRFPSIFTAVLFAASSALAAPVNTTTEDETAQIPAEAVIGYSDLEGDFDVAVLPFSNSTNNGLLFINTTIASIAAKEEGVSLEKREAEAGAASAAGASSAAAASASAAAASFTQNLIYSLQESEIFYSALRSIASSGEASNLAYLAAERAAYGAGLDGIASSVASAAASAFANTALGSGAAAYAKALAYAIAPVLTRANIITLSNAASLATTYAKGFASSAASAAASASAASAAAASSAASASSAAAAAAASSSTSTSTTVSRSTAAAAGAASAAGASSAAAASASAAAASFTQNLIYSLQESEIFYSALRSIASSGEASNLAYLAAERAAYGAGLDGIASSVASAAASAFANTALGSGAAAYAKALAYAIAPVLTRANIITLSNAASLATTYAKGFASSAASAAASASAASAAAASSAASASSAAAAAAASSSTSTSTTVSRSTAAAAGAASAAGASSAAAASASAAAASFTQNLIYSLQESEIFYSALRSIASSGEASNLAYLAAERAAYGAGLDGIASSVASAAASAFANTALGSGAAAYAKALAYAIAPVLTRANIITLSNAASLATTYAKGFASSAASAAASASAASAAAASSAASASSAAAAAAASSSTSTSTTVSRSTAAAAGAASAAGASSAAAASASAAAASFTQNLIYSLQESEIFYSALRSIASSGEASNLAYLAAERAAYGAGLDGIASSVASAAASAFANTALGSGAAAYAKALAYAIAPVLTRANIITLSNAASLATTYAKGFASSAASAAASASAASAAAASSAASASSAAAAAAASSSTSTSTTVSRSTAAAAGDYKDDDDKDYKDDDDKDYKDDDDK

SEQ ID NO: 1422 - protein, 770 aa, synthetic construct
  REGION 1..770: note = Description of Artificial Sequence: Synthetic polypeptide
MRFPSIFTAVLFAASSALAAPVNTTTEDETAQIPAEAVIGYSDLEGDFDVAVLPFSNSTNNGLLFINTTIASIAAKEEGVSLEKREAEAGAGAGGAGGYGAGQGYGAGAGAGAAAGAGAGGARGYGARQGYGSGAGAGAGARAGGAGGYGRGAGAGAAAASGAGAGGYGAGQGYGAGAGAVASAAAGAGSGAGGAGGYGRGAGAVAGAGAGGAGGYGAGAGAAAGVGAGGSGGYGGRQGGYSAGAGAGAAAAAGAGAGGAGGYGAGQGYGAGAGAGAAAGAGAGGARGYGARQGYGSGAGAGAGARAGGAGGYGRGAGAGAAAASGAGAGGYGAGQGYGAGAGAVASAAAGAGSGAGGAGGYGRGAGAVAGAGAGGAGGYGAGAGAAAGVGAGGSGGYGGRQGGYSAGAGAGAAAAAGAGAGGAGGYGAGQGYGAGAGAGAAAGAGAGGARGYGARQGYGSGAGAGAGARAGGAGGYGRGAGAGAAAASGAGAGGYGAGQGYGAGAGAVASAAAGAGSGAGGAGGYGRGAGAVAGAGAGGAGGYGAGAGAAAGVGAGGSGGYGGRQGGYSAGAGAGAAAAAGAGAGGAGGYGAGQGYGAGAGAGAAAGAGAGGARGYGARQGYGSGAGAGAGARAGGAGGYGRGAGAGAAAASGAGAGGYGAGQGYGAGAGAVASAAAGAGSGAGGAGGYGRGAGAVAGAGAGGAGGYGAGAGAAAGVGAGGSGGYGGRQGGYSAGAGAGAAAAAGDYKDDDDKDYKDDDDKDYKDDDDK

SEQ ID NO: 1423 - protein, 914 aa, synthetic construct
  REGION 1..914: note = Description of Artificial Sequence: Synthetic polypeptide
MRFPSIFTAVLFAASSALAAPVNTTTEDETAQIPAEAVIGYSDLEGDFDVAVLPFSNSTNNGLLFINTTIASIAAKEEGVSLEKREAEAGAGYTGPSGPSTGPSGYPGPLGGGAPFGQSGFGGSDGPQGGFGATGGASAGLISRVANALANTSTLRTVLRTGVSQQIASSVVQRAAQSLASTLGVDGNNLARFAVQAVSRLPAGSDTSAYAQAFSSALFNAGVLNASNIDTLGSRVLSALLNGVSSAAQGLGINVDSGSVQSDISSSSSFLSTSSSSASYSQASASSTSGAGYTGPSGPSTGPSGYPGPLGGGAPFGQSGFGGSDGPQGGFGATGGASAGLISRVANALANTSTLRTVLRTGVSQQIASSVVQRAAQSLASTLGVDGNNLARFAVQAVSRLPAGSDTSAYAQAFSSALFNAGVLNASNIDTLGSRVLSALLNGVSSAAQGLGINVDSGSVQSDISSSSSFLSTSSSSASYSQASASSTSGAGYTGPSGPSTGPSGYPGPLGGGAPFGQSGFGGSDGPQGGFGATGGASAGLISRVANALANTSTLRTVLRTGVSQQIASSVVQRAAQSLASTLGVDGNNLARFAVQAVSRLPAGSDTSAYAQAFSSALFNAGVLNASNIDTLGSRVLSALLNGVSSAAQGLGINVDSGSVQSDISSSSSFLSTSSSSASYSQASASSTSGAGYTGPSGPSTGPSGYPGPLGGGAPFGQSGFGGSDGPQGGFGATGGASAGLISRVANALANTSTLRTVLRTGVSQQIASSVVQRAAQSLASTLGVDGNNLARFAVQAVSRLPAGSDTSAYAQAFSSALFNAGVLNASNIDTLGSRVLSALLNGVSSAAQGLGINVDSGSVQSDISSSSSFLSTSSSSASYSQASASSTSGDYKDDDDKDYKDDDDKDYKDDDDK

SEQ ID NO: 1424 - protein, 1226 aa, synthetic construct
  REGION 1..1226: note = Description of Artificial Sequence: Synthetic polypeptide
MRFPSIFTAVLFAASSALAAPVNTTTEDETAQIPAEAVIGYSDLEGDFDVAVLPFSNSTNNGLLFINTTIASIAAKEEGVSLEKREAEAGSQAGSQAGSQAGSQAGSQAASQAGSQSASQASASSSASAFASASAFAQSASFALSSSSSFASAVSSASSVSALGTLGYQVGLQAAGSLGISNSQAFASSISQALTSVGVGASSSAYASAVSGVVAQYLSGTGVLTSANAQALASSFANVFAASAASASAAASASSAASAQSAAAALAQSQSAASAFSQAASQAFSQAASQAGSQAASQAGSQAASQAGSQAASQAGSQAASQAGSQAASQSGSGASSFTTTISRSSAGSQTGSQAGSQAGSQAGSQAGSQAGSQAGSQAGSQAGSQAASQAGSQSASQASASSSASAFASASAFAQSASFALSSSSSFASAVSSASSVSALGTLGYQVGLQAAGSLGISNSQAFASSISQALTSVGVGASSSAYASAVSGVVAQYLSGTGVLTSANAQALASSFANVFAASAASASAAASASSAASAQSAAAALAQSQSAASAFSQAASQAFSQAASQAGSQAASQAGSQAASQAGSQAASQAGSQAASQAGSQAASQSGSGASSFTTTISRSSAGSQTGSQAGSQAGSQAGSQAGSQAGSQAGSQAGSQAGSQAASQAGSQSASQASASSSASAFASASAFAQSASFALSSSSSFASAVSSASSVSALGTLGYQVGLQAAGSLGISNSQAFASSISQALTSVGVGASSSAYASAVSGVVAQYLSGTGVLTSANAQALASSFANVFAASAASASAAASASSAASAQSAAAALAQSQSAASAFSQAASQAFSQAASQAGSQAASQAGSQAASQAGSQAASQAGSQAASQAGSQAASQSGSGASSFTTTISRSSAGSQTGSQAGSQAGSQAGSQAGSQAGSQAGSQAGSQAGSQAASQAGSQSASQASASSSASAFASASAFAQSASFALSSSSSFASAVSSASSVSALGTLGYQVGLQAAGSLGISNSQAFASSISQALTSVGVGASSSAYASAVSGVVAQYLSGTGVLTSANAQALASSFANVFAASAASASAAASASSAASAQSAAAALAQSQSAASAFSQAASQAFSQAASQAGSQAASQAGSQAASQAGSQAASQAGSQAASQAGSQAASQSGSGASSFTTTISRSSAGSQTGSQAGSQAGSQAGSQAGDYKDDDDKDYKDDDDKDYKDDDDK

SEQ ID NO: 1425 - protein, 790 aa, synthetic construct
  REGION 1..790: note = Description of Artificial Sequence: Synthetic polypeptide
MRFPSIFTAVLFAASSALAAPVNTTTEDETAQIPAEAVIGYSDLEGDFDVAVLPFSNSTNNGLLFINTTIASIAAKEEGVSLEKREAEAGAGAGAGAGAGAGYSAGAGYGIGAGAGVGAGAGAGAGAGSGTGTGAGYGYGSSTQSSSTIYAATYQGGYGRVAGLGAGAGAGAGAGGGAGAGAGTGAGAGAGIGAGYGAGAGYGAGAGTGSGAGAGAGGGAAAGAGSGVGAGYGAGAGYGAGAGAGGGAGAGAGSGASAGAGAGAGAGAGAGYSAGAGYGIGAGAGVGAGAGAGAGAGSGTGTGAGYGYGSSTQSSSTIYAATYQGGYGRVAGLGAGAGAGAGAGGGAGAGAGTGAGAGAGIGAGYGAGAGYGAGAGTGSGAGAGAGGGAAAGAGSGVGAGYGAGAGYGAGAGAGGGAGAGAGSGASAGAGAGAGAGAGAGYSAGAGYGIGAGAGVGAGAGAGAGAGSGTGTGAGYGYGSSTQSSSTIYAATYQGGYGRVAGLGAGAGAGAGAGGGAGAGAGTGAGAGAGIGAGYGAGAGYGAGAGTGSGAGAGAGGGAAAGAGSGVGAGYGAGAGYGAGAGAGGGAGAGAGSGASAGAGAGAGAGAGAGYSAGAGYGIGAGAGVGAGAGAGAGAGSGTGTGAGYGYGSSTQSSSTIYAATYQGGYGRVAGLGAGAGAGAGAGGGAGAGAGTGAGAGAGIGAGYGAGAGYGAGAGTGSGAGAGAGGGAAAGAGSGVGAGYGAGAGYGAGAGAGGGAGAGAGSGASAGDYKDDDDKDYKDDDDKDYKDDDDK

SEQ ID NO: 1426 - protein, 810 aa, synthetic construct
  REGION 1..810: note = Description of Artificial Sequence: Synthetic polypeptide
MRFPSIFTAVLFAASSALAAPVNTTTEDETAQIPAEAVIGYSDLEGDFDVAVLPFSNSTNNGLLFINTTIASIAAKEEGVSLEKREAEAGSGYGAGAGAGAGSGYGAGAGAGSGYGAGAGAGAGSGYVAGAGAGAGAGSGYGAGAGAGAGSSYSAGAGAGAGSGYGAGSSASAGSAVSTQTVSSSATTSSQSAAAATGAAYGTRASTGSGASAGAAASGAGAGYGGQAGYGQGGGAAAYRAGAGSQAAYGQGASGSSGAAAAAGSGYGAGAGAGAGSGYGAGAGAGSGYGAGAGAGAGSGYVAGAGAGAGAGSGYGAGAGAGAGSSYSAGAGAGAGSGYGAGSSASAGSAVSTQTVSSSATTSSQSAAAATGAAYGTRASTGSGASAGAAASGAGAGYGGQAGYGQGGGAAAYRAGAGSQAAYGQGASGSSGAAAAAGSGYGAGAGAGAGSGYGAGAGAGSGYGAGAGAGAGSGYVAGAGAGAGAGSGYGAGAGAGAGSSYSAGAGAGAGSGYGAGSSASAGSAVSTQTVSSSATTSSQSAAAATGAAYGTRASTGSGASAGAAASGAGAGYGGQAGYGQGGGAAAYRAGAGSQAAYGQGASGSSGAAAAAGSGYGAGAGAGAGSGYGAGAGAGSGYGAGAGAGAGSGYVAGAGAGAGAGSGYGAGAGAGAGSSYSAGAGAGAGSGYGAGSSASAGSAVSTQTVSSSATTSSQSAAAATGAAYGTRASTGSGASAGAAASGAGAGYGGQAGYGQGGGAAAYRAGAGSQAAYGQGASGSSGAAAAAGDYKDDDDKDYKDDDDKDYKDDDDK

SEQ ID NO: 1427 - protein, 726 aa, synthetic construct
  REGION 1..726: note = Description of Artificial Sequence: Synthetic polypeptide
MRFPSIFTAVLFAASSALAAPVNTTTEDETAQIPAEAVIGYSDLEGDFDVAVLPFSNSTNNGLLFINTTIASIAAKEEGVSLEKREAEAGAGAGGAGGYGRGAGAGAGAAAGAGAGAAAGAGAGGYGGQGGYGAGAGAGAAAAAGAGAGGAGGYGRGAGAGAGVAAGAGAGGYGGQGGYGAGAGAGAAAAAATGAGGAGGYGRGAGAGAGAAAGAGAGTGGAGYGGQGGYGAGAGAGAAAAAGAGAGGAGGYGRGAGAGAGAAAGAGAGAAAGAGAGGYGGQGGYGAGAGAGAAAAAGAGAGGAGGYGRGAGAGAGVAAGAGAGGYGGQGGYGAGAGAGAAAAAATGAGGAGGYGRGAGAGAGAAAGAGAGTGGAGYGGQGGYGAGAGAGAAAAAGAGAGGAGGYGRGAGAGAGAAAGAGAGAAAGAGAGGYGGQGGYGAGAGAGAAAAAGAGAGGAGGYGRGAGAGAGVAAGAGAGGYGGQGGYGAGAGAGAAAAAATGAGGAGGYGRGAGAGAGAAAGAGAGTGGAGYGGQGGYGAGAGAGAAAAAGAGAGGAGGYGRGAGAGAGAAAGAGAGAAAGAGAGGYGGQGGYGAGAGAGAAAAAGAGAGGAGGYGRGAGAGAGVAAGAGAGGYGGQGGYGAGAGAGAAAAAATGAGGAGGYGRGAGAGAGAAAGAGAGTGGAGYGGQGGYGAGAGAGAAAAAGDYKDDDDKDYKDDDDKDYKDDDDK

SEQ ID NO: 1428 - protein, 1070 aa, synthetic construct
  REGION 1..1070: note = Description of Artificial Sequence: Synthetic polypeptide
MRFPSIFTAVLFAASSALAAPVNTTTEDETAQIPAEAVIGYSDLEGDFDVAVLPFSNSTNNGLLFINTTIASIAAKEEGVSLEKREAEAGAAQKQPSGESSVATASAAATSVTSGGAPVGKPGVPAPIFYPQGPLQQGPAPGPSNVQPGTSQQGPIGGVGGSNAFSSSFASALSLNRGFTEVISSASATAVASAFQKGLAPYGTAFALSAASAAADAYNSIGSGANAFAYAQAFARVLYPLVRQYGLSSSGKASAFASAIASSFSSGTSGQGPSIGQQQPPVTISAASASAGASAAAVGGGQVGQGPYGGQQQSTAASASAAAATATSGAAQKQPSGESSVATASAAATSVTSGGAPVGKPGVPAPIFYPQGPLQQGPAPGPSNVQPGTSQQGPIGGVGGSNAFSSSFASALSLNRGFTEVISSASATAVASAFQKGLAPYGTAFALSAASAAADAYNSIGSGANAFAYAQAFARVLYPLVRQYGLSSSGKASAFASAIASSFSSGTSGQGPSIGQQQPPVTISAASASAGASAAAVGGGQVGQGPYGGQQQSTAASASAAAATATSGAAQKQPSGESSVATASAAATSVTSGGAPVGKPGVPAPIFYPQGPLQQGPAPGPSNVQPGTSQQGPIGGVGGSNAFSSSFASALSLNRGFTEVISSASATAVASAFQKGLAPYGTAFALSAASAAADAYNSIGSGANAFAYAQAFARVLYPLVRQYGLSSSGKASAFASAIASSFSSGTSGQGPSIGQQQPPVTISAASASAGASAAAVGGGQVGQGPYGGQQQSTAASASAAAATATSGAAQKQPSGESSVATASAAATSVTSGGAPVGKPGVPAPIFYPQGPLQQGPAPGPSNVQPGTSQQGPIGGVGGSNAFSSSFASALSLNRGFTEVISSASATAVASAFQKGLAPYGTAFALSAASAAADAYNSIGSGANAFAYAQAFARVLYPLVRQYGLSSSGKASAFASAIASSFSSGTSGQGPSIGQQQPPVTISAASASAGASAAAVGGGQVGQGPYGGQQQSTAASASAAAATATSGDYKDDDDKDYKDDDDKDYKDDDDK

SEQ ID NO: 1429 - protein, 1186 aa, synthetic construct
  REGION 1..1186: note = Description of Artificial Sequence: Synthetic polypeptide
MRFPSIFTAVLFAASSALAAPVNTTTEDETAQIPAEAVIGYSDLEGDFDVAVLPFSNSTNNGLLFINTTIASIAAKEEGVSLEKREAEAGGAPGGGPGGAGPGGAGFGPGGGAGFGPGGGAGFGPGGAAGGPGGPGGPGGPGGAGGYGPGGAGGYGPGGVGPGGAGGYGPGGAGGYGPGGSGPGGAGPGGAGGEGPVTVDVDVTVGPEGVGGGPGGAGPGGAGFGPGGGAGFGPGGAPGAPGGPGGPGGPGGPGGPGGVGPGGAGGYGPGGAGGVGPAGTGGFGPGGAGGFGPGGAGGFGPGGAGGFGPGGAGGYGPGGVGPGGAGGFGPGGVGPGGSGPGGAGGEGPVTVDVDVSVGGAPGGGPGGAGPGGAGFGPGGGAGFGPGGGAGFGPGGAAGGPGGPGGPGGPGGAGGYGPGGAGGYGPGGVGPGGAGGYGPGGAGGYGPGGSGPGGAGPGGAGGEGPVTVDVDVTVGPEGVGGGPGGAGPGGAGFGPGGGAGFGPGGAPGAPGGPGGPGGPGGPGGPGGVGPGGAGGYGPGGAGGVGPAGTGGFGPGGAGGFGPGGAGGFGPGGAGGFGPGGAGGYGPGGVGPGGAGGFGPGGVGPGGSGPGGAGGEGPVTVDVDVSVGGAPGGGPGGAGPGGAGFGPGGGAGFGPGGGAGFGPGGAAGGPGGPGGPGGPGGAGGYGPGGAGGYGPGGVGPGGAGGYGPGGAGGYGPGGSGPGGAGPGGAGGEGPVTVDVDVTVGPEGVGGGPGGAGPGGAGFGPGGGAGFGPGGAPGAPGGPGGPGGPGGPGGPGGVGPGGAGGYGPGGAGGVGPAGTGGFGPGGAGGFGPGGAGGFGPGGAGGFGPGGAGGYGPGGVGPGGAGGFGPGGVGPGGSGPGGAGGEGPVTVDVDVSVGGAPGGGPGGAGPGGAGFGPGGGAGFGPGGGAGFGPGGAAGGPGGPGGPGGPGGAGGYGPGGAGGYGPGGVGPGGAGGYGPGGAGGYGPGGSGPGGAGPGGAGGEGPVTVDVDVTVGPEGVGGGPGGAGPGGAGFGPGGGAGFGPGGAPGAPGGPGGPGGPGGPGGPGGVGPGGAGGYGPGGAGGVGPAGTGGFGPGGAGGFGPGGAGGFGPGGAGGFGPGGAGGYGPGGVGPGGAGGFGPGGVGPGGSGPGGAGGEGPVTVDVDVSVGDYKDDDDKDYKDDDDKDYKDDDDK

SEQ ID NO: 1430 - protein, 822 aa, synthetic construct
  REGION 1..822: note = Description of Artificial Sequence: Synthetic polypeptide
MRFPSIFTAVLFAASSALAAPVNTTTEDETAQIPAEAVIGYSDLEGDFDVAVLPFSNSTNNGLLFINTTIASIAAKEEGVSLEKREAEAGSGAARAAQTASAASAASASSSLQQSLGSALAQSSSFAAAFDQANSAASAAAIAYALAQSAANQVGLSSYSAAISNAAAAAVGSVGGYASASAYAFAFASGVSQVLSNYGLINLSNALFLASSIANAASASASSAAAAASSSSAATGAAAALGGAGSAAATSTTTITSTSTAVAAASGSGAARAAQTASAASAASASSSLQQSLGSALAQSSSFAAAFDQANSAASAAAIAYALAQSAANQVGLSSYSAAISNAAAAAVGSVGGYASASAYAFAFASGVSQVLSNYGLINLSNALFLASSIANAASASASSAAAAASSSSAATGAAAALGGAGSAAATSTTTITSTSTAVAAASGSGAARAAQTASAASAASASSSLQQSLGSALAQSSSFAAAFDQANSAASAAAIAYALAQSAANQVGLSSYSAAISNAAAAAVGSVGGYASASAYAFAFASGVSQVLSNYGLINLSNALFLASSIANAASASASSAAAAASSSSAATGAAAALGGAGSAAATSTTTITSTSTAVAAASGSGAARAAQTASAASAASASSSLQQSLGSALAQSSSFAAAFDQANSAASAAAIAYALAQSAANQVGLSSYSAAISNAAAAAVGSVGGYASASAYAFAFASGVSQVLSNYGLINLSNALFLASSIANAASASASSAAAAASSSSAATGAAAALGGAGSAAATSTTTITSTSTAVAAASGDYKDDDDKDYKDDDDKDYKDDDDK

SEQ ID NO: 1431 - protein, 1190 aa, synthetic construct
  REGION 1..1190: note = Description of Artificial Sequence: Synthetic polypeptide
MRFPSIFTAVLFAASSALAAPVNTTTEDETAQIPAEAVIGYSDLEGDFDVAVLPFSNSTNNGLLFINTTIASIAAKEEGVSLEKREAEAGAGGSGPGGAGPGGAGPGGAGPGGVGPGGAGGPGGAGGPFGPGGSGPGGAGGAGGPYGPGGAYGPGGPGGPGGPGGPGSGGPYGPGGAYGPGGAYGPGGAYGPGGAGGPYGPGGPYGPGGPYGPGGAGGPGGAGGPYGPGGAGPGGYGPGGAGPGGYGPGGSGPGGAGPGGYGPGGSGPGGAGPGGYGPGGAGPGGYGPGGAGPGGAGPGGAGPGGYGPGGSGPGGPGSGGPGGAGGSGGTTVIEDLDITVNGPGGPITISEELTVGGPGAGGSGPGGAGPGGAGPGGAGPGGVGPGGAGGPGGAGGPFGPGGSGPGGAGGAGGPYGPGGAYGPGGPGGPGGPGGPGSGGPYGPGGAYGPGGAYGPGGAYGPGGAGGPYGPGGPYGPGGPYGPGGAGGPGGAGGPYGPGGAGPGGYGPGGAGPGGYGPGGSGPGGAGPGGYGPGGSGPGGAGPGGYGPGGAGPGGYGPGGAGPGGAGPGGAGPGGYGPGGSGPGGPGSGGPGGAGGSGGTTVIEDLDITVNGPGGPITISEELTVGGPGAGGSGPGGAGPGGAGPGGAGPGGVGPGGAGGPGGAGGPFGPGGSGPGGAGGAGGPYGPGGAYGPGGPGGPGGPGGPGSGGPYGPGGAYGPGGAYGPGGAYGPGGAGGPYGPGGPYGPGGPYGPGGAGGPGGAGGPYGPGGAGPGGYGPGGAGPGGYGPGGSGPGGAGPGGYGPGGSGPGGAGPGGYGPGGAGPGGYGPGGAGPGGAGPGGAGPGGYGPGGSGPGGPGSGGPGGAGGSGGTTVIEDLDITVNGPGGPITISEELTVGGPGAGGSGPGGAGPGGAGPGGAGPGGVGPGGAGGPGGAGGPFGPGGSGPGGAGGAGGPYGPGGAYGPGGPGGPGGPGGPGSGGPYGPGGAYGPGGAYGPGGAYGPGGAGGPYGPGGPYGPGGPYGPGGAGGPGGAGGPYGPGGAGPGGYGPGGAGPGGYGPGGSGPGGAGPGGYGPGGSGPGGAGPGGYGPGGAGPGGYGPGGAGPGGAGPGGAGPGGYGPGGSGPGGPGSGGPGGAGGSGGTTVIEDLDITVNGPGGPITISEELTVGGPGDYKDDDDKDYKDDDDKDYKDDDDK

SEQ ID NO: 1432 - protein, 818 aa, synthetic construct
  REGION 1..818: note = Description of Artificial Sequence: Synthetic polypeptide
MRFPSIFTAVLFAASSALAAPVNTTTEDETAQIPAEAVIGYSDLEGDFDVAVLPFSNSTNNGLLFINTTIASIAAKEEGVSLEKREAEAGSQAASQSASSSASQASASSFAQASSASLAASSSFSSAFSSATSLSALGNVAYQLGFDVGTNLGLTNAAGLAAAFSQAASSVGVGGSSGAYANALSNAAAQFLSAQGILNTVNAGSLASSFASALSSVAASAAAQASSQSQAASSAFSRAASQSASQSAARSGAQSSSSTTTTSSSGSQAASQSASSSASQASASSFAQASSASLAASSSFSSAFSSATSLSALGNVAYQLGFDVGTNLGLTNAAGLAAAFSQAASSVGVGGSSGAYANALSNAAAQFLSAQGILNTVNAGSLASSFASALSSVAASAAAQASSQSQAASSAFSRAASQSASQSAARSGAQSSSSTTTTSSSGSQAASQSASSSASQASASSFAQASSASLAASSSFSSAFSSATSLSALGNVAYQLGFDVGTNLGLTNAAGLAAAFSQAASSVGVGGSSGAYANALSNAAAQFLSAQGILNTVNAGSLASSFASALSSVAASAAAQASSQSQAASSAFSRAASQSASQSAARSGAQSSSSTTTTSSSGSQAASQSASSSASQASASSFAQASSASLAASSSFSSAFSSATSLSALGNVAYQLGFDVGTNLGLTNAAGLAAAFSQAASSVGVGGSSGAYANALSNAAAQFLSAQGILNTVNAGSLASSFASALSSVAASAAAQASSQSQAASSAFSRAASQSASQSAARSGAQSSSSTTTTSSSGDYKDDDDKDYKDDDDKDYKDDDDK

SEQ ID NO: 1433 - protein, 1046 aa, synthetic construct
  REGION 1..1046: note = Description of Artificial Sequence: Synthetic polypeptide
MRFPSIFTAVLFAASSALAAPVNTTTEDETAQIPAEAVIGYSDLEGDFDVAVLPFSNSTNNGLLFINTTIASIAAKEEGVSLEKREAEAGGFGPGGAGPGGAGPGGAGPGGAGPGGAGPGGAGPGGAGPGGAGPGGAGGAGGAGGAGGSGGAGGSGGTTIIEDLDITIDGADGPITISEELTISGAGGSGPGGAGPGGVGPGGSGPGGVGPGGSGPGGVGPGGSGPGGVGPGGAGGPYGPGGSGPGGAGGAGGPGGAYGPGGSYGPGGSGGPGGAGGPYGPGGEGPGGAGGPYGPGGAGGPYGPGGAGGPYGPGGEGGPYGPGGFGPGGAGPGGAGPGGAGPGGAGPGGAGPGGAGPGGAGPGGAGPGGAGGAGGAGGAGGSGGAGGSGGTTIIEDLDITIDGADGPITISEELTISGAGGSGPGGAGPGGVGPGGSGPGGVGPGGSGPGGVGPGGSGPGGVGPGGAGGPYGPGGSGPGGAGGAGGPGGAYGPGGSYGPGGSGGPGGAGGPYGPGGEGPGGAGGPYGPGGAGGPYGPGGAGGPYGPGGEGGPYGPGGFGPGGAGPGGAGPGGAGPGGAGPGGAGPGGAGPGGAGPGGAGPGGAGGAGGAGGAGGSGGAGGSGGTTIIEDLDITIDGADGPITISEELTISGAGGSGPGGAGPGGVGPGGSGPGGVGPGGSGPGGVGPGGSGPGGVGPGGAGGPYGPGGSGPGGAGGAGGPGGAYGPGGSYGPGGSGGPGGAGGPYGPGGEGPGGAGGPYGPGGAGGPYGPGGAGGPYGPGGEGGPYGPGGFGPGGAGPGGAGPGGAGPGGAGPGGAGPGGAGPGGAGPGGAGPGGAGGAGGAGGAGGSGGAGGSGGTTIIEDLDITIDGADGPITISEELTISGAGGSGPGGAGPGGVGPGGSGPGGVGPGGSGPGGVGPGGSGPGGVGPGGAGGPYGPGGSGPGGAGGAGGPGGAYGPGGSYGPGGSGGPGGAGGPYGPGGEGPGGAGGPYGPGGAGGPYGPGGAGGPYGPGGEGGPYGPGDYKDDDDKDYKDDDDKDYKDDDDK

SEQ ID NO: 1434 - protein, 842 aa, synthetic construct
  REGION 1..842: note = Description of Artificial Sequence: Synthetic polypeptide
MRFPSIFTAVLFAASSALAAPVNTTTEDETAQIPAEAVIGYSDLEGDFDVAVLPFSNSTNNGLLFINTTIASIAAKEEGVSLEKREAEAGEAFSASSASSAVVFESAGPGEEAGSSGGGASAAASAAAAAGAGSGRRGPGGARSRGGAGAGAGAGSGVGGYGSGSGAGAGAGAGAGAGGEGGFGEGQGYGAGAGAGFGSGAGAGAGAGSGAGAGEGVGSGAGAGAGAGFGVGAGAGAGAGAGFGSGAGAGSGAGAGYGAGRAGGRGRGGRGGEAFSASSASSAVVFESAGPGEEAGSSGGGASAAASAAAAAGAGSGRRGPGGARSRGGAGAGAGAGSGVGGYGSGSGAGAGAGAGAGAGGEGGFGEGQGYGAGAGAGFGSGAGAGAGAGSGAGAGEGVGSGAGAGAGAGFGVGAGAGAGAGAGFGSGAGAGSGAGAGYGAGRAGGRGRGGRGGEAFSASSASSAVVFESAGPGEEAGSSGGGASAAASAAAAAGAGSGRRGPGGARSRGGAGAGAGAGSGVGGYGSGSGAGAGAGAGAGAGGEGGFGEGQGYGAGAGAGFGSGAGAGAGAGSGAGAGEGVGSGAGAGAGAGFGVGAGAGAGAGAGFGSGAGAGSGAGAGYGAGRAGGRGRGGRGGEAFSASSASSAVVFESAGPGEEAGSSGGGASAAASAAAAAGAGSGRRGPGGARSRGGAGAGAGAGSGVGGYGSGSGAGAGAGAGAGAGGEGGFGEGQGYGAGAGAGFGSGAGAGAGAGSGAGAGEGVGSGAGAGAGAGFGVGAGAGAGAGAGFGSGAGAGSGAGAGYGAGRAGGRGRGGRGGDYKDDDDKDYKDDDDKDYKDDDDK

SEQ ID NO: 1435 - protein, 1118 aa, synthetic construct
  REGION 1..1118: note = Description of Artificial Sequence: Synthetic polypeptide
MRFPSIFTAVLFAASSALAAPVNTTTEDETAQIPAEAVIGYSDLEGDFDVAVLPFSNSTNNGLLFINTTIASIAAKEEGVSLEKREAEAGGYGPGAGQQGPGGAGQQGPGSQGPGGQGPYGPGAGQQGPGSQGPGSGGQQGPGGQGPYGPSAAAAAAAAGGYGPGAGQQGPGSQGPGSGGQQGPGSQGPGSGGQQGPGGQGPYGPSAAAAAAAAGGYGPGAGQQGPGSQGPGSGGQQGPGGQGPYGPGAAAAAAAVGGYGPGAGQQGPGSQGPGSGGQQGPGGQGPYGPSAAAAAAAAGGYGPGAGQQGPGSQGPGSGGQQGPGGQGPYGPSAAAAAAAAGGYGPGAGQQGPGGAGQQGPGSQGPGGQGPYGPGAGQQGPGSQGPGSGGQQGPGGQGPYGPSAAAAAAAAGGYGPGAGQQGPGSQGPGSGGQQGPGSQGPGSGGQQGPGGQGPYGPSAAAAAAAAGGYGPGAGQQGPGSQGPGSGGQQGPGGQGPYGPGAAAAAAAVGGYGPGAGQQGPGSQGPGSGGQQGPGGQGPYGPSAAAAAAAAGGYGPGAGQQGPGSQGPGSGGQQGPGGQGPYGPSAAAAAAAAGGYGPGAGQQGPGGAGQQGPGSQGPGGQGPYGPGAGQQGPGSQGPGSGGQQGPGGQGPYGPSAAAAAAAAGGYGPGAGQQGPGSQGPGSGGQQGPGSQGPGSGGQQGPGGQGPYGPSAAAAAAAAGGYGPGAGQQGPGSQGPGSGGQQGPGGQGPYGPGAAAAAAAVGGYGPGAGQQGPGSQGPGSGGQQGPGGQGPYGPSAAAAAAAAGGYGPGAGQQGPGSQGPGSGGQQGPGGQGPYGPSAAAAAAAAGGYGPGAGQQGPGGAGQQGPGSQGPGGQGPYGPGAGQQGPGSQGPGSGGQQGPGGQGPYGPSAAAAAAAAGGYGPGAGQQGPGSQGPGSGGQQGPGSQGPGSGGQQGPGGQGPYGPSAAAAAAAAGGYGPGAGQQGPGSQGPGSGGQQGPGGQGPYGPGAAAAAAAVGGYGPGAGQQGPGSQGPGSGGQQGPGGQGPYGPSAAAAAAAAGGYGPGAGQQGPGSQGPGSGGQQGPGGQGPYGPSAAAAAAAAGDYKDDDDKDYKDDDDKDYKDDDDK

SEQ ID NO: 1436 - protein, 834 aa, synthetic construct
  REGION 1..834: note = Description of Artificial Sequence: Synthetic polypeptide
MRFPSIFTAVLFAASSALAAPVNTTTEDETAQIPAEAVIGYSDLEGDFDVAVLPFSNSTNNGLLFINTTIASIAAKEEGVSLEKREAEAGNVGYQLGFNVANTLGIGNAPGLGNALSQAVSSVGVGASSSAYANAVSNAVGQFLAGQGVLNAGNAGSLASSFANALSASAASVASSAAAQSAFQSQAAASAFSRAASQSASQSAARSGAQSSSTTTTTSTSGSQAASQSASSAAAQASASSFAQASSASLAASSAFSSAFSSANSLSALGNVGYQLGFNVANTLGIGNAPGLGNALSQAVSSVGVGASSSAYANAVSNAVGQFLAGQGVLNAGNAGSLASSFANALSASAASVASSAAAQSAFQSQAAASAFSRAASQSASQSAARSGAQSSSTTTTTSTSGSQAASQSASSAAAQASASSFAQASSASLAASSAFSSAFSSANSLSALGNVGYQLGFNVANTLGIGNAPGLGNALSQAVSSVGVGASSSAYANAVSNAVGQFLAGQGVLNAGNAGSLASSFANALSASAASVASSAAAQSAFQSQAAASAFSRAASQSASQSAARSGAQSSSTTTTTSTSGSQAASQSASSAAAQASASSFAQASSASLAASSAFSSAFSSANSLSALGNVGYQLGFNVANTLGIGNAPGLGNALSQAVSSVGVGASSSAYANAVSNAVGQFLAGQGVLNAGNAGSLASSFANALSASAASVASSAAAQSAFQSQAAASAFSRAASQSASQSAARSGAQSSSTTTTTSTSGSQAASQSASSAAAQASASSFAQASSASLAASSAFSSAFSSANSLSALGDYKDDDDKDYKDDDDKDYKDDDDK

SEQ ID NO: 1437 - protein, 878 aa, synthetic construct
  REGION 1..878: note = Description of Artificial Sequence: Synthetic polypeptide
MRFPSIFTAVLFAASSALAAPVNTTTEDETAQIPAEAVIGYSDLEGDFDVAVLPFSNSTNNGLLFINTTIASIAAKEEGVSLEKREAEAGPGGAGGPYGPGGPGGAGPGGYGPGGYGPGGAGPGGAGPGGYGPGGAGPGGYGPGGAGPGGSGPGGIGPGGSGPGGYGPGGIGPGGTGPGGAGPGGAGPGGAGPSGAGPGGAGPSGAGRGGSGRGSVGRGGAGRGGAGRGGAGGAGGSGGAGGSGGAGGSGGTTIIEDLDITVDGANGPITISEELTIGGAGPGGAGGPYGPGGPGGAGPGGYGPGGYGPGGAGPGGAGPGGYGPGGAGPGGYGPGGAGPGGSGPGGIGPGGSGPGGYGPGGIGPGGTGPGGAGPGGAGPGGAGPSGAGPGGAGPSGAGRGGSGRGSVGRGGAGRGGAGRGGAGGAGGSGGAGGSGGAGGSGGTTIIEDLDITVDGANGPITISEELTIGGAGPGGAGGPYGPGGPGGAGPGGYGPGGYGPGGAGPGGAGPGGYGPGGAGPGGYGPGGAGPGGSGPGGIGPGGSGPGGYGPGGIGPGGTGPGGAGPGGAGPGGAGPSGAGPGGAGPSGAGRGGSGRGSVGRGGAGRGGAGRGGAGGAGGSGGAGGSGGAGGSGGTTIIEDLDITVDGANGPITISEELTIGGAGPGGAGGPYGPGGPGGAGPGGYGPGGYGPGGAGPGGAGPGGYGPGGAGPGGYGPGGAGPGGSGPGGIGPGGSGPGGYGPGGIGPGGTGPGGAGPGGAGPGGAGPSGAGPGGAGPSGAGRGGSGRGSVGRGGAGRGGAGRGGAGGAGGSGGAGGSGGAGGSGGTTIIEDLDITVDGANGPITISEELTIGGAGDYKDDDDKDYKDDDDKDYKDDDDK

SEQ ID NO: 1438 - protein, 1078 aa, synthetic construct
  REGION 1..1078: note = Description of Artificial Sequence: Synthetic polypeptide
MRFPSIFTAVLFAASSALAAPVNTTTEDETAQIPAEAVIGYSDLEGDFDVAVLPFSNSTNNGLLFINTTIASIAAKEEGVSLEKREAEAGAGAGQGGRGGYGQGGFGGQGSGAGAGASAAAGAGAGQGGRGGYGQGGFGGQGSGAGAGASAAAGAGAGQGGRGGYGQGGFGGQGSGAGAGASAAAAAGAGQGGRGGYGQGGLGGSGSGAGAGAGAAAAAAAGAGGYGQGGLGGYGQGAGAGQGGLGGYGSGAGAGASAAAAAGAGGAGQGGLGGYGQGAGAGQGGLGGYGSGAGAGAAAAAAAGAGGSGQGGLGGYGSGGGAGGASAAAAGAGAGQGGRGGYGQGGFGGQGSGAGAGASAAAGAGAGQGGRGGYGQGGFGGQGSGAGAGASAAAGAGAGQGGRGGYGQGGFGGQGSGAGAGASAAAAAGAGQGGRGGYGQGGLGGSGSGAGAGAGAAAAAAAGAGGYGQGGLGGYGQGAGAGQGGLGGYGSGAGAGASAAAAAGAGGAGQGGLGGYGQGAGAGQGGLGGYGSGAGAGAAAAAAAGAGGSGQGGLGGYGSGGGAGGASAAAAGAGAGQGGRGGYGQGGFGGQGSGAGAGASAAAGAGAGQGGRGGYGQGGFGGQGSGAGAGASAAAGAGAGQGGRGGYGQGGFGGQGSGAGAGASAAAAAGAGQGGRGGYGQGGLGGSGSGAGAGAGAAAAAAAGAGGYGQGGLGGYGQGAGAGQGGLGGYGSGAGAGASAAAAAGAGGAGQGGLGGYGQGAGAGQGGLGGYGSGAGAGAAAAAAAGAGGSGQGGLGGYGSGGGAGGASAAAAGAGAGQGGRGGYGQGGFGGQGSGAGAGASAAAGAGAGQGGRGGYGQGGFGGQGSGAGAGASAAAGAGAGQGGRGGYGQGGFGGQGSGAGAGASAAAAAGAGQGGRGGYGQGGLGGSGSGAGAGAGAAAAAAAGAGGYGQGGLGGYGQGAGAGQGGLGGYGSGAGAGASAAAAAGAGGAGQGGLGGYGQGAGAGQGGLGGYGSGAGAGAAAAAAAGAGGSGQGGLGGYGSGGGAGGASAAAAGDYKDDDDKDYKDDDDKDYKDDDDK

SEQ ID NO: 1439 - protein, 1090 aa, synthetic construct
  REGION 1..1090: note = Description of Artificial Sequence: Synthetic polypeptide
MRFPSIFTAVLFAASSALAAPVNTTTEDETAQIPAEAVIGYSDLEGDFDVAVLPFSNSTNNGLLFINTTIASIAAKEEGVSLEKREAEAGPGGYGGPGQPGPGQGQYGPGPGQQGPRQGGQQGPASAAAAAAAGPGGYGGPGQQGPRQGQQQGPASAAAAAAAAAAGPRGYGGPGQQGPVQGGQQGPASAAAAAAAAGVGGYGGPGQQGPGQGQYGPGTGQQGQGPSGQQGPAGAAAAAAGGAAGPGGYGGPGQQGPGQGQYGPGTGQQGQGPSGQQGPAGAAAAAAAAAGPGGYGGPGQQGPGQGQYGPGAGQQGQGPGSQQGPASAAAAAAGPGGYGGPGQPGPGQGQYGPGPGQQGPRQGGQQGPASAAAAAAAGPGGYGGPGQQGPRQGQQQGPASAAAAAAAAAAGPRGYGGPGQQGPVQGGQQGPASAAAAAAAAGVGGYGGPGQQGPGQGQYGPGTGQQGQGPSGQQGPAGAAAAAAGGAAGPGGYGGPGQQGPGQGQYGPGTGQQGQGPSGQQGPAGAAAAAAAAAGPGGYGGPGQQGPGQGQYGPGAGQQGQGPGSQQGPASAAAAAAGPGGYGGPGQPGPGQGQYGPGPGQQGPRQGGQQGPASAAAAAAAGPGGYGGPGQQGPRQGQQQGPASAAAAAAAAAAGPRGYGGPGQQGPVQGGQQGPASAAAAAAAAGVGGYGGPGQQGPGQGQYGPGTGQQGQGPSGQQGPAGAAAAAAGGAAGPGGYGGPGQQGPGQGQYGPGTGQQGQGPSGQQGPAGAAAAAAAAAGPGGYGGPGQQGPGQGQYGPGAGQQGQGPGSQQGPASAAAAAAGPGGYGGPGQPGPGQGQYGPGPGQQGPRQGGQQGPASAAAAAAAGPGGYGGPGQQGPRQGQQQGPASAAAAAAAAAAGPRGYGGPGQQGPVQGGQQGPASAAAAAAAAGVGGYGGPGQQGPGQGQYGPGTGQQGQGPSGQQGPAGAAAAAAGGAAGPGGYGGPGQQGPGQGQYGPGTGQQGQGPSGQQGPAGAAAAAAAAAGPGGYGGPGQQGPGQGQYGPGAGQQGQGPGSQQGPASAAAAAAGDYKDDDDKDYKDDDDKDYKDDDDK

SEQ ID NO: 1440 - DNA, 2400 bp, synthetic construct
  misc_feature 1..2400: note = Description of Artificial Sequence: Synthetic polynucleotide
  source 1..2400: mol_type = other DNA
atgagatttccttcaatttttactgctgttttattcgcagcatcctccgcattagctgctccagtcaacactacaacagaagatgaaacggcacaaattccggctgaagctgtcatcggttactcagatttagaaggggatttcgatgttgctgttttgccattttccaacagcacaaataacgggttattgtttataaatactactattgccagcattgctgctaaagaagaaggggtatctctcgagaaaagagaggctgaagcaggtgttttgaatgctggtaacgcttcggctcttgctggttcttttgcaagagccttgtctgcaagcgctgaatcacagagttttgctcaatcacaagcttatcagcaggccagtgcttttcagcaagctgctgctcagtccgcagcacagtcagcttctagagctggcagcacctcaagttctacgacaacaactacttcgggagctacatctcaagcagcttctcaaagcgcatcttctagttattcgagtgcctttgcacaagccgcttcttcctccctcgcaacctcttccgccatttccagagcatttgcctcagttagttcagcctctgccgcaagtagtctagcttacaacataggactatcagctgctcgcagtttgggaattgcatccgataccgccctggctggtgcattggcccaggccgtaggaggtgttggtgcaggtgcttcagcgtcagcgtatgcaaacgctatagctagagccgctggacaattcttggcaacacaaggtgttttgaatgctggtaacgcttcggctcttgctggttcttttgcaagagccttgtctgcaagcgctgaatcacagagttttgctcaatcacaagcttatcagcaggccagtgcttttcagcaagctgctgctcagtccgcagcacagtcagcttctagagctggcagcacctcaagttctacgacaacaactacttcgggagctacatctcaagcagcttctcaaagcgcatcttctagttattcgagtgcctttgcacaagccgcttcttcctccctcgcaacctcttccgccatttccagagcatttgcctcagttagttcagcctctgccgcaagtagtctagcttacaacataggactatcagctgctcgcagtttgggaattgcatccgataccgccctggctggtgcattggcccaggccgtaggaggtgttggtgcaggtgcttcagcgtcagcgtatgcaaacgctatagctagagccgctggacaattcttggcaacacaaggtgttttgaatgctggtaacgcttcggctcttgctggttcttttgcaagagccttgtctgcaagcgctgaatcacagagttttgctcaatcacaagcttatcagcaggccagtgcttttcagcaagctgctgctcagtccgcagcacagtcagcttctagagctggcagcacctcaagttctacgacaacaactacttcgggagctacatctcaagcagcttctcaaagcgcatcttctagttattcgagtgcctttgcacaagccgcttcttcctccctcgcaacctcttccgccatttccagagcatttgcctcagttagttcagcctctgccgcaagtagtctagcttacaacataggactatcagctgctcgcagtttgggaattgcatccgataccgccctggctggtgcattggcccaggccgtaggaggtgttggtgcaggtgcttcagcgtcagcgtatgcaaacgctatagctagagccgctggacaattcttggcaacacaaggtgttttgaatgctggtaacgcttcggctcttgctggttcttttgcaagagccttgtctgcaagcgctgaatcacagagttttgctcaatcacaagcttatcagcaggccagtgcttttcagcaagctgctgctcagtccgcagcacagtcagcttctagagctggcagcacctcaagttctacgacaacaactacttcgggagctacatctcaagcagcttctcaaagcgcatcttctagttattcgagtgcctttgcacaagccgcttcttcctccctcgcaacctcttccgccatttccagagcatttgcctcagttagttcagcctctgccgcaagtagtctagcttacaacataggactatcagctgctcgcagtttgggaattgcatccgataccgccctggctggtgcattggcccaggccgtaggaggtgttggtgcaggtgcttcagcgtcagcgtatgcaaacgctatagctagagccgctggacaattcttggcaacacaaggtgactacaaagatgacgacgataaagattacaaagacgatgacgataaggactataaagatgatgacgacaaataataa

SEQ ID NO: 1441 - DNA, 2844 bp, synthetic construct
  misc_feature 1..2844: note = Description of Artificial Sequence: Synthetic polynucleotide
  source 1..2844: mol_type = other DNA
atgagatttccttcaatttttactgctgttttattcgcagcatcctccgcattagctgctccagtcaacactacaacagaagatgaaacggcacaaattccggctgaagctgtcatcggttactcagatttagaaggggatttcgatgttgctgttttgccattttccaacagcacaaataacgggttattgtttataaatactactattgccagcattgctgctaaagaagaaggggtatctctcgagaaaagagaggctgaagcaggtatcaatgtcgattccgacataggttctgtaacctcgctcatactgtcaggtagcactctacaaatgactataccagccggtggtgatgatcttagcggaggttaccctggaggattcccagctggagcacaaccgagtggtggcgctcctgttgatttcggcggaccatcagctggcggtgacgttgctgcaaagctggctagatctttggcatctacattggcctcatcaggtgttttcagagcagcgtttaattccagagtatcaacacctgttgctgttcagtttacagatgccctagtgcagaaaatcgcctccaatcttggactggattacgctacggctagtaagctgcgaaaggcatcccaggctgtctccaaggtcagaatgggaagtgacactaacgcctacgccctggctatttcttcagctttagctgaagtattgtcctcatccggaaaagtcgcagacgctaatattaatcagattgctcctcagctagcctcaggtatcgttttaggagtttctactacggccccacagtttggagtagacttgagctcaattaatgttaatctcgacatttccaatgttgctcgcaatatgcaagccagcatacaaggtatcaatgtcgattccgacataggttctgtaacctcgctcatactgtcaggtagcactctacaaatgactataccagccggtggtgatgatcttagcggaggttaccctggaggattcccagctggagcacaaccgagtggtggcgctcctgttgatttcggcggaccatcagctggcggtgacgttgctgcaaagctggctagatctttggcatctacattggcctcatcaggtgttttcagagcagcgtttaattccagagtatcaacacctgttgctgttcagtttacagatgccctagtgcagaaaatcgcctccaatcttggactggattacgctacggctagtaagctgcgaaaggcatcccaggctgtctccaaggtcagaatgggaagtgacactaacgcctacgccctggctatttcttcagctttagctgaagtattgtcctcatccggaaaagtcgcagacgctaatattaatcagattgctcctcagctagcctcaggtatcgttttaggagtttctactacggccccacagtttggagtagacttgagctcaattaatgttaatctcgacatttccaatgttgctcgcaatatgcaagccagcatacaaggtatcaatgtcgattccgacataggttctgtaacctcgctcatactgtcaggtagcactctacaaatgactataccagccggtggtgatgatcttagcggaggttaccctggaggattcccagctggagcacaaccgagtggtggcgctcctgttgatttcggcggaccatcagctggcggtgacgttgctgcaaagctggctagatctttggcatctacattggcctcatcaggtgttttcagagcagcgtttaattccagagtatcaacacctgttgctgttcagtttacagatgccctagtgcagaaaatcgcctccaatcttggactggattacgctacggctagtaagctgcgaaaggcatcccaggctgtctccaaggtcagaatgggaagtgacactaacgcctacgccctggctatttcttcagctttagctgaagtattgtcctcatccggaaaagtcgcagacgctaatattaatcagattgctcctcagctagcctcaggtatcgttttaggagtttctactacggccccacagtttggagtagacttgagctcaattaatgttaatctcgacatttccaatgttgctcgcaatatgcaagccagcatacaaggtatcaatgtcgattccgacataggttctgtaacctcgctcatactgtcaggtagcactctacaaatgactataccagccggtggtgatgatcttagcggaggttaccctggaggattcccagctggagcacaaccgagtggtggcgctcctgttgatttcggcggaccatcagctggcggtgacgttgctgcaaagctggctagatctttggcatctacattggcctcatcaggtgttttcagagcagcgtttaattccagagtatcaacacctgttgctgttcagtttacagatgccctagtgcagaaaatcgcctccaatcttggactggattacgctacggctagtaagctgcgaaaggcatcccaggctgtctccaaggtcagaatgggaagtgacactaacgcctacgccctggctatttcttcagctttagctgaagtattgtcctcatccggaaaagtcgcagacgctaatattaatcagattgctcctcagctagcctcaggtatcgttttaggagtttctactacggccccacagtttggagtagacttgagctcaattaatgttaatctcgacatttccaatgttgctcgcaatatgcaagccagcatacaaggtgactacaaagatgacgacgataaagattacaaagacgatgacgataaggactataaagatgatgacgacaaataataa

SEQ ID NO: 1442 - DNA, 2376 bp, synthetic construct
  misc_feature 1..2376: note = Description of Artificial Sequence: Synthetic polynucleotide
  source 1..2376: mol_type = other DNA
atgagatttccttcaatttttactgctgttttattcgcagcatcctccgcattagctgctccagtcaacactacaacagaagatgaaacggcacaaattccggctgaagctgtcatcggttactcagatttagaaggggatttcgatgttgctgttttgccattttccaacagcacaaataacgggttattgtttataaatactactattgccagcattgctgctaaagaagaaggggtatctctcgagaaaagagaggctgaagcaggtgccgctgctacatcttcatcgaccagcggagcctcggcctctagtatttcgtccacaactgcctcaagttcttctacaggagcaagttcagctgccgctggagctagtcacggagcagcttcggcgggtggagcatttgattttacgagagctctattttctgaactgctagaatctaagatattttccgccaccacggcaaactttcatagttccacaacggcttctgaaactctttacgccaccattctgaagtgccttagggaattacacttcaggtacgacgaatgcttgcaaggtgcaactgaagtggtgagtgatttgtctgtagtatccgttggttctggagttcacaactacgctagagttattgcagctttctttgaacgcttctttcgaaagcacgacatcccattgtccgcaaactatgcttccagagttgcacagtatttaatttcagctatgggcagttcggtagcttccgcagacgcttcgtcgtcatcaggtgccgctgctacatcttcatcgaccagcggagcctcggcctctagtatttcgtccacaactgcctcaagttcttctacaggagcaagttcagctgccgctggagctagtcacggagcagcttcggcgggtggagcatttgattttacgagagctctattttctgaactgctagaatctaagatattttccgccaccacggcaaactttcatagttccacaacggcttctgaaactctttacgccaccattctgaagtgccttagggaattacacttcaggtacgacgaatgcttgcaaggtgcaactgaagtggtgagtgatttgtctgtagtatccgttggttctggagttcacaactacgctagagttattgcagctttctttgaacgcttctttcgaaagcacgacatcccattgtccgcaaactatgcttccagagttgcacagtatttaatttcagctatgggcagttcggtagcttccgcagacgcttcgtcgtcatcaggtgccgctgctacatcttcatcgaccagcggagcctcggcctctagtatttcgtccacaactgcctcaagttcttctacaggagcaagttcagctgccgctggagctagtcacggagcagcttcggcgggtggagcatttgattttacgagagctctattttctgaactgctagaatctaagatattttccgccaccacggcaaactttcatagttccacaacggcttctgaaactctttacgccaccattctgaagtgccttagggaattacacttcaggtacgacgaatgcttgcaaggtgcaactgaagtggtgagtgatttgtctgtagtatccgttggttctggagttcacaactacgctagagttattgcagctttctttgaacgcttctttcgaaagcacgacatcccattgtccgcaaactatgcttccagagttgcacagtatttaatttcagctatgggcagttcggtagcttccgcagacgcttcgtcgtcatcaggtgccgctgctacatcttcatcgaccagcggagcctcggcctctagtatttcgtccacaactgcctcaagttcttctacaggagcaagttcagctgccgctggagctagtcacggagcagcttcggcgggtggagcatttgattttacgagagctctattttctgaactgctagaatctaagatattttccgccaccacggcaaactttcatagttccacaacggcttctgaaactctttacgccaccattctgaagtgccttagggaattacacttcaggtacgacgaatgcttgcaaggtgcaactgaagtggtgagtgatttgtctgtagtatccgttggttctggagttcacaactacgctagagttattgcagctttctttgaacgcttctttcgaaagcacgacatcccattgtccgcaaactatgcttccagagttgcacagtatttaatttcagctatgggcagttcggtagcttccgcagacgcttcgtcgtcatcaggtgactacaaagatgacgacgataaagattacaaagacgatgacgataaggactataaagatgatgacgacaaataataa

SEQ ID NO: 1443 - DNA, 2940 bp, synthetic construct
  misc_feature 1..2940: note = Description of Artificial Sequence: Synthetic polynucleotide
  source 1..2940: mol_type = other DNA
atgagatttccttcaatttttactgctgttttattcgcagcatcctccgcattagctgctccagtcaacactacaacagaagatgaaacggcacaaattccggctgaagctgtcatcggttactcagatttagaaggggatttcgatgttgctgttttgccattttccaacagcacaaataacgggttattgtttataaatactactattgccagcattgctgctaaagaagaaggggtatctctcgagaaaagagaggctgaagcaggtgccggagctggtggcgctggtggttatgcacaaggttacggagctggtgcaggagcaggtgctggtgccggaacaggtgcaggtggtgctggtggttacggtcaaggttacggagcaggatccggcgcgggtgcaggaggagctggtggatatggtgctggtgctggagccggtgctggagccggagatgcctccggatacggtcaaggatatggagatggagcaggagctggtgctggagctgctgctgcagcaggtgccgctgctggtgctagaggagccggaggctacggaggtggtgctggagctggagcgggtgccggtgccggagctgccggaggttatggacagggttacggtgcaggtgccggagaaggagcaggtgccggcgccggtgccggtgccgttgccggtgcaggagctgctgctgctgctggagcaggtgccggtgctggaggtgccgaaggttacggtgctggcgctggtgctggcggtgccggtggttacggtcagagctacggagatggagccgcagctgcagccggctctggcgctggtgcaggtggatcaggcggatacggtgctggtgcaggcgccggatctggtgctggagcagctggcggttatggtggtggagccggtgcaggtgccggagctggtggcgctggtggttatgcacaaggttacggagctggtgcaggagcaggtgctggtgccggaacaggtgcaggtggtgctggtggttacggtcaaggttacggagcaggatccggcgcgggtgcaggaggagctggtggatatggtgctggtgctggagccggtgctggagccggagatgcctccggatacggtcaaggatatggagatggagcaggagctggtgctggagctgctgctgcagcaggtgccgctgctggtgctagaggagccggaggctacggaggtggtgctggagctggagcgggtgccggtgccggagctgccggaggttatggacagggttacggtgcaggtgccggagaaggagcaggtgccggcgccggtgccggtgccgttgccggtgcaggagctgctgctgctgctggagcaggtgccggtgctggaggtgccgaaggttacggtgctggcgctggtgctggcggtgccggtggttacggtcagagctacggagatggagccgcagctgcagccggctctggcgctggtgcaggtggatcaggcggatacggtgctggtgcaggcgccggatctggtgctggagcagctggcggttatggtggtggagccggtgcaggtgccggagctggtggcgctggtggttatgcacaaggttacggagctggtgcaggagcaggtgctggtgccggaacaggtgcaggtggtgctggtggttacggtcaaggttacggagcaggatccggcgcgggtgcaggaggagctggtggatatggtgctggtgctggagccggtgctggagccggagatgcctccggatacggtcaaggatatggagatggagcaggagctggtgctggagctgctgctgcagcaggtgccgctgctggtgctagaggagccggaggctacggaggtggtgctggagctggagcgggtgccggtgccggagctgccggaggttatggacagggttacggtgcaggtgccggagaaggagcaggtgccggcgccggtgccggtgccgttgccggtgcaggagctgctgctgctgctggagcaggtgccggtgctggaggtgccgaaggttacggtgctggcgctggtgctggcggtgccggtggttacggtcagagctacggagatggagccgcagctgcagccggctctggcgctggtgcaggtggatcaggcggatacggtgctggtgcaggcgccggatctggtgctggagcagctggcggttatggtggtggagccggtgcaggtgccggagctggtggcgctggtggttatgcacaaggttacggagctggtgcaggagcaggtgctggtgccggaacaggtgcaggtggtgctggtggttacggtcaaggttacggagcaggatccggcgcgggtgcaggaggagctggtggatatggtgctggtgctggagccggtgctggagccggagatgcctccggatacggtcaaggatatggagatggagcaggagctggtgctggagctgctgctgcagcaggtgccgctgctggtgctagaggagccggaggctacggaggtggtgctggagctggagcgggtgccggtgccggagctgccggaggttatggacagggttacggtgcaggtgccggagaaggagcaggtgccggcgccggtgccggtgccgttgccggtgcaggagctgctgctgctgctggagcaggtgccggtgctggaggtgccgaaggttacggtgctggcgctggtgctggcggtgccggtggttacggtcagagctacggagatggagccgcagctgcagccggctctggcgctggtgcaggtggatcaggcggatacggtgctggtgcaggcgccggatctggtgctggagcagctggcggttatggtggtggagccggtgcaggtgactacaaagatgacgacgataaagattacaaagacgatgacgataaggactataaagatgatgacgacaaataataa

SEQ ID NO: 1444 - DNA, 2928 bp, synthetic construct
  misc_feature 1..2928: note = Description of Artificial Sequence: Synthetic polynucleotide
  source 1..2928: mol_type = other DNA
atgagatttccttcaatttttactgctgttttattcgcagcatcctccgcattagctgctccagtcaacactacaacagaagatgaaacggcacaaattccggctgaagctgtcatcggttactcagatttagaaggggatttcgatgttgctgttttgccattttccaacagcacaaataacgggttattgtttataaatactactattgccagcattgctgctaaagaagaaggggtatctctcgagaaaagagaggctgaagcaggttcttccgccggacttgtaagcagagtcgcaaatgcattggctaacaccagtacattacgcgctgttctgcgaaggggtgtaagtcaacagactgcttcctccgtcgtgcagagagccgttcaatcccttgccggaacgctaggagttgatggaaattccttgtccagaattgccctgcaagcaattagtcaattgcctggtggtagtgatacttctgcatacgcccaggctttctcatctgctttattcaacgcaggtgtattgaacgcttcaaacatagacactttgggttcgagggttttgtctgccgttctgaacggtgtctcttctgccgcccaaggtattggactcaacgttgatacaggttctgtacaaagcgacatttcttctagttcatcttttttatcaagtagtagttcgtcggcaagtttcagccaaacctccgcttcgagcacctctggtgccggttatacagccccagctggaccgtctggatacactggtccttccggaccatccggatacacgggtccggtaggaggtgctgctcaatttggatctgtttcaggtcaaacatctttcggacaaacatcaggatttactgcaagtaccggcggacaggctgctttcggtgcaacctcaggttcttccgccggacttgtaagcagagtcgcaaatgcattggctaacaccagtacattacgcgctgttctgcgaaggggtgtaagtcaacagactgcttcctccgtcgtgcagagagccgttcaatcccttgccggaacgctaggagttgatggaaattccttgtccagaattgccctgcaagcaattagtcaattgcctggtggtagtgatacttctgcatacgcccaggctttctcatctgctttattcaacgcaggtgtattgaacgcttcaaacatagacactttgggttcgagggttttgtctgccgttctgaacggtgtctcttctgccgcccaaggtattggactcaacgttgatacaggttctgtacaaagcgacatttcttctagttcatcttttttatcaagtagtagttcgtcggcaagtttcagccaaacctccgcttcgagcacctctggtgccggttatacagccccagctggaccgtctggatacactggtccttccggaccatccggatacacgggtccggtaggaggtgctgctcaatttggatctgtttcaggtcaaacatctttcggacaaacatcaggatttactgcaagtaccggcggacaggctgctttcggtgcaacctcaggttcttccgccggacttgtaagcagagtcgcaaatgcattggctaacaccagtacattacgcgctgttctgcgaaggggtgtaagtcaacagactgcttcctccgtcgtgcagagagccgttcaatcccttgccggaacgctaggagttgatggaaattccttgtccagaattgccctgcaagcaattagtcaattgcctggtggtagtgatacttctgcatacgcccaggctttctcatctgctttattcaacgcaggtgtattgaacgcttcaaacatagacactttgggttcgagggttttgtctgccgttctgaacggtgtctcttctgccgcccaaggtattggactcaacgttgatacaggttctgtacaaagcgacatttcttctagttcatcttttttatcaagtagtagttcgtcggcaagtttcagccaaacctccgcttcgagcacctctggtgccggttatacagccccagctggaccgtctggatacactggtccttccggaccatccggatacacgggtccggtaggaggtgctgctcaatttggatctgtttcaggtcaaacatctttcggacaaacatcaggatttactgcaagtaccggcggacaggctgctttcggtgcaacctcaggttcttccgccggacttgtaagcagagtcgcaaatgcattggctaacaccagtacattacgcgctgttctgcgaaggggtgtaagtcaacagactgcttcctccgtcgtgcagagagccgttcaatcccttgccggaacgctaggagttgatggaaattccttgtccagaattgccctgcaagcaattagtcaattgcctggtggtagtgatacttctgcatacgcccaggctttctcatctgctttattcaacgcaggtgtattgaacgcttcaaacatagacactttgggttcgagggttttgtctgccgttctgaacggtgtctcttctgccgcccaaggtattggactcaacgttgatacaggttctgtacaaagcgacatttcttctagttcatcttttttatcaagtagtagttcgtcggcaagtttcagccaaacctccgcttcgagcacctctggtgccggttatacagccccagctggaccgtctggatacactggtccttccggaccatccggatacacgggtccggtaggaggtgctgctcaatttggatctgtttcaggtcaaacatctttcggacaaacatcaggatttactgcaagtaccggcggacaggctgctttcggtgcaacctcaggtgactacaaagatgacgacgataaagattacaaagacgatgacgataaggactataaagatgatgacgacaaataataa

SEQ ID NO: 1445 - DNA, 2508 bp, synthetic construct
  misc_feature 1..2508: note = Description of Artificial Sequence: Synthetic polynucleotide
  source 1..2508: mol_type = other DNA
atgagatttccttcaatttttactgctgttttattcgcagcatcctccgcattagctgctccagtcaacactacaacagaagatgaaacggcacaaattccggctgaagctgtcatcggttactcagatttagaaggggatttcgatgttgctgttttgccattttccaacagcacaaataacgggttattgtttataaatactactattgccagcattgctgctaaagaagaaggggtatctctcgagaaaagagaggctgaagcaggtagtctggctagctcctttgctagtgctttatctgcgtcggccgcatcagtggcctcatccgcagcagcacaggctgcttctcaaagtcaggccgcggcatccgcattttcacgtgctgcgtctcaatctgcatcacagtccgcagcaaggtcgggagcacaaagtagttcaacaactaccacaacttctaccgctggttcgcaggccgcatcccaattcgcatcttcagctgctagccaagcctctgctagttcattcgcgagggcatcatcggcctcactggctgcatcatcttcgttctcttctgcattttcttccgcaaattcactgtcggctctgggtaacgtcggttaccaattgggcttcaatgtagctaataacttgggaatctcaaatgccgcaggattgggtaacgctttatcacaggccgtttcttccgtcggagtaggcgctagttcttcctcttatgccaacgcagtttccaatgcagtgggtcagtttttggctggacaaggtatcttaaacgcagctaacgcaggtagtctggctagctcctttgctagtgctttatctgcgtcggccgcatcagtggcctcatccgcagcagcacaggctgcttctcaaagtcaggccgcggcatccgcattttcacgtgctgcgtctcaatctgcatcacagtccgcagcaaggtcgggagcacaaagtagttcaacaactaccacaacttctaccgctggttcgcaggccgcatcccaattcgcatcttcagctgctagccaagcctctgctagttcattcgcgagggcatcatcggcctcactggctgcatcatcttcgttctcttctgcattttcttccgcaaattcactgtcggctctgggtaacgtcggttaccaattgggcttcaatgtagctaataacttgggaatctcaaatgccgcaggattgggtaacgctttatcacaggccgtttcttccgtcggagtaggcgctagttcttcctcttatgccaacgcagtttccaatgcagtgggtcagtttttggctggacaaggtatcttaaacgcagctaacgcaggtagtctggctagctcctttgctagtgctttatctgcgtcggccgcatcagtggcctcatccgcagcagcacaggctgcttctcaaagtcaggccgcggcatccgcattttcacgtgctgcgtctcaatctgcatcacagtccgcagcaaggtcgggagcacaaagtagttcaacaactaccacaacttctaccgctggttcgcaggccgcatcccaattcgcatcttcagctgctagccaagcctctgctagttcattcgcgagggcatcatcggcctcactggctgcatcatcttcgttctcttctgcattttcttccgcaaattcactgtcggctctgggtaacgtcggttaccaattgggcttcaatgtagctaataacttgggaatctcaaatgccgcaggattgggtaacgctttatcacaggccgtttcttccgtcggagtaggcgctagttcttcctcttatgccaacgcagtttccaatgcagtgggtcagtttttggctggacaaggtatcttaaacgcagctaacgcaggtagtctggctagctcctttgctagtgctttatctgcgtcggccgcatcagtggcctcatccgcagcagcacaggctgcttctcaaagtcaggccgcggcatccgcattttcacgtgctgcgtctcaatctgcatcacagtccgcagcaaggtcgggagcacaaagtagttcaacaactaccacaacttctaccgctggttcgcaggccgcatcccaattcgcatcttcagctgctagccaagcctctgctagttcattcgcgagggcatcatcggcctcactggctgcatcatcttcgttctcttctgcattttcttccgcaaattcactgtcggctctgggtaacgtcggttaccaattgggcttcaatgtagctaataacttgggaatctcaaatgccgcaggattgggtaacgctttatcacaggccgtttcttccgtcggagtaggcgctagttcttcctcttatgccaacgcagtttccaatgcagtgggtcagtttttggctggacaaggtatcttaaacgcagctaacgcaggtgactacaaagatgacgacgataaagattacaaagacgatgacgataaggactataaagatgatgacgacaaataataa

SEQ ID NO: 1446 - DNA, 2496 bp, synthetic construct
  misc_feature 1..2496: note = Description of Artificial Sequence: Synthetic polynucleotide
  source 1..2496: mol_type = other DNA
atgagatttccttcaatttttactgctgttttattcgcagcatcctccgcattagctgctccagtcaacactacaacagaagatgaaacggcacaaattccggctgaagctgtcatcggttactcagatttagaaggggatttcgatgttgctgttttgccattttccaacagcacaaataacgggttattgtttataaatactactattgccagcattgctgctaaagaagaaggggtatctctcgagaaaagagaggctgaagcaggtgctagctccaccactaccgctacctctgaatccggaattacagcttcatcggttgccacaggagctgctgcagccataagtaaaactgcagcaggatcttctagcatcacctatttggccagatcatttagtaggtcattggtgagttatttgttacaaagtgccgaattccactccgttttctactctggaattagttcaggtattgccagtcatattgcttcgacagcaggtacgtctacggctgaatctttggacctggcttccctgaagtccgtgatagcaactgcctgtggtaaagctatggcggctactaactctgatggtggaccacacgcctttgccaattccctgggttccgccattacggccgttttgattgaaaacgctattcttacgtcagagaattatgattattttgctaaagaattcgcacacatattctccatttctgcatctaaggtagtaagtgccacctccgcaaaatctgcaagtgaagccaccagtgcttcgtggacagctgcgtcacgtacaggtgctagctccaccactaccgctacctctgaatccggaattacagcttcatcggttgccacaggagctgctgcagccataagtaaaactgcagcaggatcttctagcatcacctatttggccagatcatttagtaggtcattggtgagttatttgttacaaagtgccgaattccactccgttttctactctggaattagttcaggtattgccagtcatattgcttcgacagcaggtacgtctacggctgaatctttggacctggcttccctgaagtccgtgatagcaactgcctgtggtaaagctatggcggctactaactctgatggtggaccacacgcctttgccaattccctgggttccgccattacggccgttttgattgaaaacgctattcttacgtcagagaattatgattattttgctaaagaattcgcacacatattctccatttctgcatctaaggtagtaagtgccacctccgcaaaatctgcaagtgaagccaccagtgcttcgtggacagctgcgtcacgtacaggtgctagctccaccactaccgctacctctgaatccggaattacagcttcatcggttgccacaggagctgctgcagccataagtaaaactgcagcaggatcttctagcatcacctatttggccagatcatttagtaggtcattggtgagttatttgttacaaagtgccgaattccactccgttttctactctggaattagttcaggtattgccagtcatattgcttcgacagcaggtacgtctacggctgaatctttggacctggcttccctgaagtccgtgatagcaactgcctgtggtaaagctatggcggctactaactctgatggtggaccacacgcctttgccaattccctgggttccgccattacggccgttttgattgaaaacgctattcttacgtcagagaattatgattattttgctaaagaattcgcacacatattctccatttctgcatctaaggtagtaagtgccacctccgcaaaatctgcaagtgaagccaccagtgcttcgtggacagctgcgtcacgtacaggtgctagctccaccactaccgctacctctgaatccggaattacagcttcatcggttgccacaggagctgctgcagccataagtaaaactgcagcaggatcttctagcatcacctatttggccagatcatttagtaggtcattggtgagttatttgttacaaagtgccgaattccactccgttttctactctggaattagttcaggtattgccagtcatattgcttcgacagcaggtacgtctacggctgaatctttggacctggcttccctgaagtccgtgatagcaactgcctgtggtaaagctatggcggctactaactctgatggtggaccacacgcctttgccaattccctgggttccgccattacggccgttttgattgaaaacgctattcttacgtcagagaattatgattattttgctaaagaattcgcacacatattctccatttctgcatctaaggtagtaagtgccacctccgcaaaatctgcaagtgaagccaccagtgcttcgtggacagctgcgtcacgtacaggtgactacaaagatgacgacgataaagattacaaagacgatgacgataaggactataaagatgatgacgacaaataataa

SEQ ID NO: 1447 - DNA, 2136 bp, synthetic construct
  misc_feature 1..2136: note = Description of Artificial Sequence: Synthetic polynucleotide
  source 1..2136: mol_type = other DNA
atgagatttccttcaatttttactgctgttttattcgcagcatcctccgcattagctgctccagtcaacactacaacagaagatgaaacggcacaaattccggctgaagctgtcatcggttactcagatttagaaggggatttcgatgttgctgttttgccattttccaacagcacaaataacgggttattgtttataaatactactattgccagcattgctgctaaagaagaaggggtatctctcgagaaaagagaggctgaagcaggtggaggttatggaagaggtcaaggtgctggagctggtgttggagctggagccggtgccgcagctggagcagccgctatcgccagagccggtggttacggtcagggagccggaggatatggtcaaggtcaaggagcaggagctgctgcgggtgccgccgctggagcaggcgctggtggctatggtcaaggtgccggtggttatggtaggggccaaggtgcaggtgcaggagcaggtgccggtgccggtgctaggggttacggtcagggtgcaggtgccggcgctgctgccggagccgctgctagcgctggtgctggaggttatggtcaaggtgctggcggttacggccaaggtcaaggtgccggagctgctgctggcgccgctgcttctgccggagctggcggatacggacaaggtgctggaggatacggtcagggtcaaggagcaggtggaggttatggaagaggtcaaggtgctggagctggtgttggagctggagccggtgccgcagctggagcagccgctatcgccagagccggtggttacggtcagggagccggaggatatggtcaaggtcaaggagcaggagctgctgcgggtgccgccgctggagcaggcgctggtggctatggtcaaggtgccggtggttatggtaggggccaaggtgcaggtgcaggagcaggtgccggtgccggtgctaggggttacggtcagggtgcaggtgccggcgctgctgccggagccgctgctagcgctggtgctggaggttatggtcaaggtgctggcggttacggccaaggtcaaggtgccggagctgctgctggcgccgctgcttctgccggagctggcggatacggacaaggtgctggaggatacggtcagggtcaaggagcaggtggaggttatggaagaggtcaaggtgctggagctggtgttggagctggagccggtgccgcagctggagcagccgctatcgccagagccggtggttacggtcagggagccggaggatatggtcaaggtcaaggagcaggagctgctgcgggtgccgccgctggagcaggcgctggtggctatggtcaaggtgccggtggttatggtaggggccaaggtgcaggtgcaggagcaggtgccggtgccggtgctaggggttacggtcagggtgcaggtgccggcgctgctgccggagccgctgctagcgctggtgctggaggttatggtcaaggtgctggcggttacggccaaggtcaaggtgccggagctgctgctggcgccgctgcttctgccggagctggcggatacggacaaggtgctggaggatacggtcagggtcaaggagcaggtggaggttatggaagaggtcaaggtgctggagctggtgttggagctggagccggtgccgcagctggagcagccgctatcgccagagccggtggttacggtcagggagccggaggatatggtcaaggtcaaggagcaggagctgctgcgggtgccgccgctggagcaggcgctggtggctatggtcaaggtgccggtggttatggtaggggccaaggtgcaggtgcaggagcaggtgccggtgccggtgctaggggttacggtcagggtgcaggtgccggcgctgctgccggagccgctgctagcgctggtgctggaggttatggtcaaggtgctggcggttacggccaaggtcaaggtgccggagctgctgctggcgccgctgcttctgccggagctggcggatacggacaaggtgctggaggatacggtcagggtcaaggagcaggtgactacaaagatgacgacgataaagattacaaagacgatgacgataaggactataaagatgatgacgacaaataataa

SEQ ID NO: 1448 - DNA, 2784 bp, synthetic construct
  misc_feature 1..2784: note = Description of Artificial Sequence: Synthetic polynucleotide
  source 1..2784: mol_type = other DNA
atgagatttccttcaatttttactgctgttttattcgcagcatcctccgcattagctgctccagtcaacactacaacagaagatgaaacggcacaaattccggctgaagctgtcatcggttactcagatttagaaggggatttcgatgttgctgttttgccattttccaacagcacaaataacgggttattgtttataaatactactattgccagcattgctgctaaagaagaaggggtatctctcgagaaaagagaggctgaagcaggtggaggtgttggatctcttacaggacaaacgagtttcggtcaaacctctggcttcacaagtaccgctggagctcaaggaggattcggtccgactacaggtgctcagtccgcattgatcagtcgaatcgccaatgcattggccaatacctctaccttgagatctgtcttgagaactggtgtaagtcaacagacagcatctagtgttgttcagcgagctattcaaacgctagccagtaatttaggtatagatggcaataacttgagtaggattgccctgcaagcaatatcccaagtaccagcaggttctgacacctccgcttatgcacaggctttcagtacagctctggtgactggcggcgttttaaacgccaacaacgttgatactttgggatcacaagtgctgtccgccgtgttaaacggagtttcatcggcagcacagggtcttggtatcaacgtggacactggtagcgttcaatcagatatccgatcatcaagttccagtctgtctacatcttcctcgtcggctagtttctctcagacttcaggtgctgcttctaccacaggttttaccggtgctggtggttaccctggaggtgcaggtcctctaggtggaggtgttggatctcttacaggacaaacgagtttcggtcaaacctctggcttcacaagtaccgctggagctcaaggaggattcggtccgactacaggtgctcagtccgcattgatcagtcgaatcgccaatgcattggccaatacctctaccttgagatctgtcttgagaactggtgtaagtcaacagacagcatctagtgttgttcagcgagctattcaaacgctagccagtaatttaggtatagatggcaataacttgagtaggattgccctgcaagcaatatcccaagtaccagcaggttctgacacctccgcttatgcacaggctttcagtacagctctggtgactggcggcgttttaaacgccaacaacgttgatactttgggatcacaagtgctgtccgccgtgttaaacggagtttcatcggcagcacagggtcttggtatcaacgtggacactggtagcgttcaatcagatatccgatcatcaagttccagtctgtctacatcttcctcgtcggctagtttctctcagacttcaggtgctgcttctaccacaggttttaccggtgctggtggttaccctggaggtgcaggtcctctaggtggaggtgttggatctcttacaggacaaacgagtttcggtcaaacctctggcttcacaagtaccgctggagctcaaggaggattcggtccgactacaggtgctcagtccgcattgatcagtcgaatcgccaatgcattggccaatacctctaccttgagatctgtcttgagaactggtgtaagtcaacagacagcatctagtgttgttcagcgagctattcaaacgctagccagtaatttaggtatagatggcaataacttgagtaggattgccctgcaagcaatatcccaagtaccagcaggttctgacacctccgcttatgcacaggctttcagtacagctctggtgactggcggcgttttaaacgccaacaacgttgatactttgggatcacaagtgctgtccgccgtgttaaacggagtttcatcggcagcacagggtcttggtatcaacgtggacactggtagcgttcaatcagatatccgatcatcaagttccagtctgtctacatcttcctcgtcggctagtttctctcagacttcaggtgctgcttctaccacaggttttaccggtgctggtggttaccctggaggtgcaggtcctctaggtggaggtgttggatctcttacaggacaaacgagtttcggtcaaacctctggcttcacaagtaccgctggagctcaaggaggattcggtccgactacaggtgctcagtccgcattgatcagtcgaatcgccaatgcattggccaatacctctaccttgagatctgtcttgagaactggtgtaagtcaacagacagcatctagtgttgttcagcgagctattcaaacgctagccagtaatttaggtatagatggcaataacttgagtaggattgccctgcaagcaatatcccaagtaccagcaggttctgacacctccgcttatgcacaggctttcagtacagctctggtgactggcggcgttttaaacgccaacaacgttgatactttgggatcacaagtgctgtccgccgtgttaaacggagtttcatcggcagcacagggtcttggtatcaacgtggacactggtagcgttcaatcagatatccgatcatcaagttccagtctgtctacatcttcctcgtcggctagtttctctcagacttcaggtgctgcttctaccacaggttttaccggtgctggtggttaccctggaggtgcaggtcctctaggtgactacaaagatgacgacgataaagattacaaagacgatgacgataaggactataaagatgatgacgacaaataataa

SEQ ID NO: 1449 - DNA, 2508 bp, synthetic construct
  misc_feature 1..2508: note = Description of Artificial Sequence: Synthetic polynucleotide
  source 1..2508: mol_type = other DNA
atgagatttccttcaatttttactgctgttttattcgcagcatcctccgcattagctgctccagtcaacactacaacagaagatgaaacggcacaaattccggctgaagctgtcatcggttactcagatttagaaggggatttcgatgttgctgttttgccattttccaacagcacaaataacgggttattgtttataaatactactattgccagcattgctgctaaagaagaaggggtatctctcgagaaaagagaggctgaagcaggtagcttggcaagctctttcgcctcagctctgtccgcatccgctgcttcagtcgctagctcagcagctgcacagagtgcttctcaaagtcaagctgcagcctctgccttcagtagagccgcttcgcagagtgcatctcagagtgccgcgaggtctggagcacaatcttccagtactacaacaactacgtctgcttccggatcacaagccgcctcgcaatccgcctccagtgctgcgtcacaagcttcagcttcttcatttgcacaggcctcctctgcatctctcgcagcttcctcttcgttctcttcagcattttcttcggctaacagtttgtctgctcttggtaacgtcgcatatcaactcggtttcaacgttgctaacaccctaggtattggtaatgcaccaggactcggtgccgccctttcacaggcagtgagctctgtcggcgtcggtgcatcatcaagtacttacgccaatgtcgtgtctaatgctgtgggacagtttttagcaggacaaggtgtcctgaatgctgcaaatgcaggtagcttggcaagctctttcgcctcagctctgtccgcatccgctgcttcagtcgctagctcagcagctgcacagagtgcttctcaaagtcaagctgcagcctctgccttcagtagagccgcttcgcagagtgcatctcagagtgccgcgaggtctggagcacaatcttccagtactacaacaactacgtctgcttccggatcacaagccgcctcgcaatccgcctccagtgctgcgtcacaagcttcagcttcttcatttgcacaggcctcctctgcatctctcgcagcttcctcttcgttctcttcagcattttcttcggctaacagtttgtctgctcttggtaacgtcgcatatcaactcggtttcaacgttgctaacaccctaggtattggtaatgcaccaggactcggtgccgccctttcacaggcagtgagctctgtcggcgtcggtgcatcatcaagtacttacgccaatgtcgtgtctaatgctgtgggacagtttttagcaggacaaggtgtcctgaatgctgcaaatgcaggtagcttggcaagctctttcgcctcagctctgtccgcatccgctgcttcagtcgctagctcagcagctgcacagagtgcttctcaaagtcaagctgcagcctctgccttcagtagagccgcttcgcagagtgcatctcagagtgccgcgaggtctggagcacaatcttccagtactacaacaactacgtctgcttccggatcacaagccgcctcgcaatccgcctccagtgctgcgtcacaagcttcagcttcttcatttgcacaggcctcctctgcatctctcgcagcttcctcttcgttctcttcagcattttcttcggctaacagtttgtctgctcttggtaacgtcgcatatcaactcggtttcaacgttgctaacaccctaggtattggtaatgcaccaggactcggtgccgccctttcacaggcagtgagctctgtcggcgtcggtgcatcatcaagtacttacgccaatgtcgtgtctaatgctgtgggacagtttttagcaggacaaggtgtcctgaatgctgcaaatgcaggtagcttggcaagctctttcgcctcagctctgtccgcatccgctgcttcagtcgctagctcagcagctgcacagagtgcttctcaaagtcaagctgcagcctctgccttcagtagagccgcttcgcagagtgcatctcagagtgccgcgaggtctggagcacaatcttccagtactacaacaactacgtctgcttccggatcacaagccgcctcgcaatccgcctccagtgctgcgtcacaagcttcagcttcttcatttgcacaggcctcctctgcatctctcgcagcttcctcttcgttctcttcagcattttcttcggctaacagtttgtctgctcttggtaacgtcgcatatcaactcggtttcaacgttgctaacaccctaggtattggtaatgcaccaggactcggtgccgccctttcacaggcagtgagctctgtcggcgtcggtgcatcatcaagtacttacgccaatgtcgtgtctaatgctgtgggacagtttttagcaggacaaggtgtcctgaatgctgcaaatgcaggtgactacaaagatgacgacgataaagattacaaagacgatgacgataaggactataaagatgatgacgacaaataataa

SEQ ID NO: 1450 - DNA, 2508 bp, synthetic construct
  misc_feature 1..2508: note = Description of Artificial Sequence: Synthetic polynucleotide
  source 1..2508: mol_type = other DNA
atgagatttccttcaatttttactgctgttttattcgcagcatcctccgcattagctgctccagtcaacactacaacagaagatgaaacggcacaaattccggctgaagctgtcatcggttactcagatttagaaggggatttcgatgttgctgttttgccattttccaacagcacaaataacgggttattgtttataaatactactattgccagcattgctgctaaagaagaaggggtatctctcgagaaaagagaggctgaagcaggtgctgcgtctgccgccggtgcaagcagtgcagcagcagcatccgcctcggcggcagcagcgagcttcacacaaaatttgatttacagcttgcaagaatccgaaattttttattctgcattaaggagtattgcctcttccggtgaagccagtaacctggcatacttggcagctgagcgagctgcttatggagctggactagacggtattgcaagctcagttgcttcagctgctgcgagcgctttcgctaataccgctttaggttctggagcagccgcctatgcgaaggccctagcatatgctatagcccctgttttaactcgagccaatattattaccctttctaatgctgcctctttggctaccacatatgcaaagggattcgcatctagtgcagccagtgccgcggcctcagccagcgctgcttccgccgctgctgcaagctccgctgcctccgcttcctcagccgcagccgctgcggcggcttcttccagcactagtacaagtactacagtctctcgatctacagccgcagctgcaggtgctgcgtctgccgccggtgcaagcagtgcagcagcagcatccgcctcggcggcagcagcgagcttcacacaaaatttgatttacagcttgcaagaatccgaaattttttattctgcattaaggagtattgcctcttccggtgaagccagtaacctggcatacttggcagctgagcgagctgcttatggagctggactagacggtattgcaagctcagttgcttcagctgctgcgagcgctttcgctaataccgctttaggttctggagcagccgcctatgcgaaggccctagcatatgctatagcccctgttttaactcgagccaatattattaccctttctaatgctgcctctttggctaccacatatgcaaagggattcgcatctagtgcagccagtgccgcggcctcagccagcgctgcttccgccgctgctgcaagctccgctgcctccgcttcctcagccgcagccgctgcggcggcttcttccagcactagtacaagtactacagtctctcgatctacagccgcagctgcaggtgctgcgtctgccgccggtgcaagcagtgcagcagcagcatccgcctcggcggcagcagcgagcttcacacaaaatttgatttacagcttgcaagaatccgaaattttttattctgcattaaggagtattgcctcttccggtgaagccagtaacctggcatacttggcagctgagcgagctgcttatggagctggactagacggtattgcaagctcagttgcttcagctgctgcgagcgctttcgctaataccgctttaggttctggagcagccgcctatgcgaaggccctagcatatgctatagcccctgttttaactcgagccaatattattaccctttctaatgctgcctctttggctaccacatatgcaaagggattcgcatctagtgcagccagtgccgcggcctcagccagcgctgcttccgccgctgctgcaagctccgctgcctccgcttcctcagccgcagccgctgcggcggcttcttccagcactagtacaagtactacagtctctcgatctacagccgcagctgcaggtgctgcgtctgccgccggtgcaagcagtgcagcagcagcatccgcctcggcggcagcagcgagcttcacacaaaatttgatttacagcttgcaagaatccgaaattttttattctgcattaaggagtattgcctcttccggtgaagccagtaacctggcatacttggcagctgagcgagctgcttatggagctggactagacggtattgcaagctcagttgcttcagctgctgcgagcgctttcgctaataccgctttaggttctggagcagccgcctatgcgaaggccctagcatatgctatagcccctgttttaactcgagccaatattattaccctttctaatgctgcctctttggctaccacatatgcaaagggattcgcatctagtgcagccagtgccgcggcctcagccagcgctgcttccgccgctgctgcaagctccgctgcctccgcttcctcagccgcagccgctgcggcggcttcttccagcactagtacaagtactacagtctctcgatctacagccgcagctgcaggtgactacaaagatgacgacgataaagattacaaagacgatgacgataaggactataaagatgatgacgacaaataataa

SEQ ID NO: 1451 - DNA, 2316 bp, synthetic construct
  misc_feature 1..2316: note = Description of Artificial Sequence: Synthetic polynucleotide
  source 1..2316: mol_type = other DNA
atgagatttccttcaatttttactgctgttttattcgcagcatcctccgcattagctgctccagtcaacactacaacagaagatgaaacggcacaaattccggctgaagctgtcatcggttactcagatttagaaggggatttcgatgttgctgttttgccattttccaacagcacaaataacgggttattgtttataaatactactattgccagcattgctgctaaagaagaaggggtatctctcgagaaaagagaggctgaagcaggtgccggagcgggaggtgccggaggatacggagccggtcaaggatacggtgccggcgccggcgcaggagcagctgccggagccggtgctggaggagctagaggttacggagcgagacaaggatacggcagtggtgccggtgcaggtgctggagcaagagctggtggagccggaggatacggtagaggagccggagccggtgcagctgccgcctcaggagctggtgctggaggatacggcgctggtcaaggttatggagccggtgctggcgcagtggcctccgctgctgccggtgccggatccggagcaggaggcgctggtggctatggaagaggtgccggagctgtagccggcgctggagctggtggtgctggtggttacggcgctggcgcaggtgctgctgcaggagtaggtgcaggaggaagcggaggttacggtggacgtcaaggcggttattctgctggtgctggtgcgggtgcagcagccgctgcaggtgccggagcgggaggtgccggaggatacggagccggtcaaggatacggtgccggcgccggcgcaggagcagctgccggagccggtgctggaggagctagaggttacggagcgagacaaggatacggcagtggtgccggtgcaggtgctggagcaagagctggtggagccggaggatacggtagaggagccggagccggtgcagctgccgcctcaggagctggtgctggaggatacggcgctggtcaaggttatggagccggtgctggcgcagtggcctccgctgctgccggtgccggatccggagcaggaggcgctggtggctatggaagaggtgccggagctgtagccggcgctggagctggtggtgctggtggttacggcgctggcgcaggtgctgctgcaggagtaggtgcaggaggaagcggaggttacggtggacgtcaaggcggttattctgctggtgctggtgcgggtgcagcagccgctgcaggtgccggagcgggaggtgccggaggatacggagccggtcaaggatacggtgccggcgccggcgcaggagcagctgccggagccggtgctggaggagctagaggttacggagcgagacaaggatacggcagtggtgccggtgcaggtgctggagcaagagctggtggagccggaggatacggtagaggagccggagccggtgcagctgccgcctcaggagctggtgctggaggatacggcgctggtcaaggttatggagccggtgctggcgcagtggcctccgctgctgccggtgccggatccggagcaggaggcgctggtggctatggaagaggtgccggagctgtagccggcgctggagctggtggtgctggtggttacggcgctggcgcaggtgctgctgcaggagtaggtgcaggaggaagcggaggttacggtggacgtcaaggcggttattctgctggtgctggtgcgggtgcagcagccgctgcaggtgccggagcgggaggtgccggaggatacggagccggtcaaggatacggtgccggcgccggcgcaggagcagctgccggagccggtgctggaggagctagaggttacggagcgagacaaggatacggcagtggtgccggtgcaggtgctggagcaagagctggtggagccggaggatacggtagaggagccggagccggtgcagctgccgcctcaggagctggtgctggaggatacggcgctggtcaaggttatggagccggtgctggcgcagtggcctccgctgctgccggtgccggatccggagcaggaggcgctggtggctatggaagaggtgccggagctgtagccggcgctggagctggtggtgctggtggttacggcgctggcgcaggtgctgctgcaggagtaggtgcaggaggaagcggaggttacggtggacgtcaaggcggttattctgctggtgctggtgcgggtgcagcagccgctgcaggtgactacaaagatgacgacgataaagattacaaagacgatgacgataaggactataaagatgatgacgacaaataataa

SEQ ID NO: 1452 - DNA, 2748 bp, synthetic construct
  misc_feature 1..2748: note = Description of Artificial Sequence: Synthetic polynucleotide
  source 1..2748: mol_type = other DNA
atgagatttccttcaatttttactgctgttttattcgcagcatcctccgcattagctgctccagtcaacactacaacagaagatgaaacggcacaaattccggctgaagctgtcatcggttactcagatttagaaggggatttcgatgttgctgttttgccattttccaacagcacaaataacgggttattgtttataaatactactattgccagcattgctgctaaagaagaaggggtatctctcgagaaaagagaggctgaagcaggtgcaggttacacgggaccatccggcccatcgactggtccatccggttacccaggtcctctaggtggtggagctccatttggacaaagtggcttcggaggtagtgatggtcctcaaggcggttttggtgccaccggtggtgctagcgctggtttaatctcacgagttgctaacgctttggccaacacttccacactaagaactgtacttagaactggagtgtctcaacagatagcaagtagtgttgtccagagagcagcacaatctcttgctagtactttaggcgttgacggcaataatctcgccagattcgcagttcaagcagtttccagattgcccgctggatctgatacttcagcatacgcacaggcattcagtagcgccctgtttaatgccggtgtgttgaatgccagtaacatcgacaccctaggtagtagagtcctgtccgctttactaaacggtgtaagctcagctgctcaaggtttgggcatcaacgtggattctggttctgttcaaagtgatatttcgtcatcttcaagtttcttgtctaccagcagctcctcggcttcttactctcaagctagtgccagttctacttcaggtgcaggttacacgggaccatccggcccatcgactggtccatccggttacccaggtcctctaggtggtggagctccatttggacaaagtggcttcggaggtagtgatggtcctcaaggcggttttggtgccaccggtggtgctagcgctggtttaatctcacgagttgctaacgctttggccaacacttccacactaagaactgtacttagaactggagtgtctcaacagatagcaagtagtgttgtccagagagcagcacaatctcttgctagtactttaggcgttgacggcaataatctcgccagattcgcagttcaagcagtttccagattgcccgctggatctgatacttcagcatacgcacaggcattcagtagcgccctgtttaatgccggtgtgttgaatgccagtaacatcgacaccctaggtagtagagtcctgtccgctttactaaacggtgtaagctcagctgctcaaggtttgggcatcaacgtggattctggttctgttcaaagtgatatttcgtcatcttcaagtttcttgtctaccagcagctcctcggcttcttactctcaagctagtgccagttctacttcaggtgcaggttacacgggaccatccggcccatcgactggtccatccggttacccaggtcctctaggtggtggagctccatttggacaaagtggcttcggaggtagtgatggtcctcaaggcggttttggtgccaccggtggtgctagcgctggtttaatctcacgagttgctaacgctttggccaacacttccacactaagaactgtacttagaactggagtgtctcaacagatagcaagtagtgttgtccagagagcagcacaatctcttgctagtactttaggcgttgacggcaataatctcgccagattcgcagttcaagcagtttccagattgcccgctggatctgatacttcagcatacgcacaggcattcagtagcgccctgtttaatgccggtgtgttgaatgccagtaacatcgacaccctaggtagtagagtcctgtccgctttactaaacggtgtaagctcagctgctcaaggtttgggcatcaacgtggattctggttctgttcaaagtgatatttcgtcatcttcaagtttcttgtctaccagcagctcctcggcttcttactctcaagctagtgccagttctacttcaggtgcaggttacacgggaccatccggcccatcgactggtccatccggttacccaggtcctctaggtggtggagctccatttggacaaagtggcttcggaggtagtgatggtcctcaaggcggttttggtgccaccggtggtgctagcgctggtttaatctcacgagttgctaacgctttggccaacacttccacactaagaactgtacttagaactggagtgtctcaacagatagcaagtagtgttgtccagagagcagcacaatctcttgctagtactttaggcgttgacggcaataatctcgccagattcgcagttcaagcagtttccagattgcccgctggatctgatacttcagcatacgcacaggcattcagtagcgccctgtttaatgccggtgtgttgaatgccagtaacatcgacaccctaggtagtagagtcctgtccgctttactaaacggtgtaagctcagctgctcaaggtttgggcatcaacgtggattctggttctgttcaaagtgatatttcgtcatcttcaagtttcttgtctaccagcagctcctcggcttcttactctcaagctagtgccagttctacttcaggtgactacaaagatgacgacgataaagattacaaagacgatgacgataaggactataaagatgatgacgacaaataataa

SEQ ID NO: 1453 - DNA, 3684 bp, synthetic construct
  misc_feature 1..3684: note = Description of Artificial Sequence: Synthetic polynucleotide
  source 1..3684: mol_type = other DNA
atgagatttccttcaatttttactgctgttttattcgcagcatcctccgcattagctgctccagtcaacactacaacagaagatgaaacggcacaaattccggctgaagctgtcatcggttactcagatttagaaggggatttcgatgttgctgttttgccattttccaacagcacaaataacgggttattgtttataaatactactattgccagcattgctgctaaagaagaaggggtatctctcgagaaaagagaggctgaagcaggttctcaagctggaagtcaagctggatcgcaagcaggtagtcaggcaggttctcaggctgctagtcaggccggctctcaatccgcatctcaagcttcagcttcttctagcgcttctgcatttgcttctgcttcggcatttgctcaatctgcctctttcgctcttagttcgtcctcatcatttgctagcgcagtttcaagcgcttcatcggtttcagcattgggcaccttgggataccaagtaggactgcaggcggcaggatcactaggaatttctaattcacaggcttttgcgtcaagtatttcgcaggccttaactagcgttggagttggcgcatctagttctgcgtatgcctctgccgtgtccggagtggtcgcccagtacctgtctggcactggtgtgttaacttctgctaatgcgcaagcacttgcatcatcatttgctaatgtttttgcagctagtgctgcgagcgcttccgcagctgcctcagcttcttcagccgccagcgctcaatcagccgctgccgccttggcccaatcgcagtccgcagcctcagcatttagccaggcagcctcacaggccttctcacaagcggcttctcaggctggctctcaagccgcctcacaagctggtagtcaagccgcatcacaggcaggatcccaagctgcatctcaggctggatctcaagctgcctcccaagcaggtagccaggctgcttcgcaatctggtagtggagcttcctcatttacgactactatttctcgttcatctgctggtagtcagacgggtagtcaagctggttcacaagccggttcacaggctggatcacaagcaggttctcaagctggaagtcaagctggatcgcaagcaggtagtcaggcaggttctcaggctgctagtcaggccggctctcaatccgcatctcaagcttcagcttcttctagcgcttctgcatttgcttctgcttcggcatttgctcaatctgcctctttcgctcttagttcgtcctcatcatttgctagcgcagtttcaagcgcttcatcggtttcagcattgggcaccttgggataccaagtaggactgcaggcggcaggatcactaggaatttctaattcacaggcttttgcgtcaagtatttcgcaggccttaactagcgttggagttggcgcatctagttctgcgtatgcctctgccgtgtccggagtggtcgcccagtacctgtctggcactggtgtgttaacttctgctaatgcgcaagcacttgcatcatcatttgctaatgtttttgcagctagtgctgcgagcgcttccgcagctgcctcagcttcttcagccgccagcgctcaatcagccgctgccgccttggcccaatcgcagtccgcagcctcagcatttagccaggcagcctcacaggccttctcacaagcggcttctcaggctggctctcaagccgcctcacaagctggtagtcaagccgcatcacaggcaggatcccaagctgcatctcaggctggatctcaagctgcctcccaagcaggtagccaggctgcttcgcaatctggtagtggagcttcctcatttacgactactatttctcgttcatctgctggtagtcagacgggtagtcaagctggttcacaagccggttcacaggctggatcacaagcaggttctcaagctggaagtcaagctggatcgcaagcaggtagtcaggcaggttctcaggctgctagtcaggccggctctcaatccgcatctcaagcttcagcttcttctagcgcttctgcatttgcttctgcttcggcatttgctcaatctgcctctttcgctcttagttcgtcctcatcatttgctagcgcagtttcaagcgcttcatcggtttcagcattgggcaccttgggataccaagtaggactgcaggcggcaggatcactaggaatttctaattcacaggcttttgcgtcaagtatttcgcaggccttaactagcgttggagttggcgcatctagttctgcgtatgcctctgccgtgtccggagtggtcgcccagtacctgtctggcactggtgtgttaacttctgctaatgcgcaagcacttgcatcatcatttgctaatgtttttgcagctagtgctgcgagcgcttccgcagctgcctcagcttcttcagccgccagcgctcaatcagccgctgccgccttggcccaatcgcagtccgcagcctcagcatttagccaggcagcctcacaggccttctcacaagcggcttctcaggctggctctcaagccgcctcacaagctggtagtcaagccgcatcacaggcaggatcccaagctgcatctcaggctggatctcaagctgcctcccaagcaggtagccaggctgcttcgcaatctggtagtggagcttcctcatttacgactactatttctcgttcatctgctggtagtcagacgggtagtcaagctggttcacaagccggttcacaggctggatcacaagcaggttctcaagctggaagtcaagctggatcgcaagcaggtagtcaggcaggttctcaggctgctagtcaggccggctctcaatccgcatctcaagcttcagcttcttctagcgcttctgcatttgcttctgcttcggcatttgctcaatctgcctctttcgctcttagttcgtcctcatcatttgctagcgcagtttcaagcgcttcatcggtttcagcattgggcaccttgggataccaagtaggactgcaggcggcaggatcactaggaatttctaattcacaggcttttgcgtcaagtatttcgcaggccttaactagcgttggagttggcgcatctagttctgcgtatgcctctgccgtgtccggagtggtcgcccagtacctgtctggcactggtgtgttaacttctgctaatgcgcaagcacttgcatcatcatttgctaatgtttttgcagctagtgctgcgagcgcttccgcagctgcctcagcttcttcagccgccagcgctcaatcagccgctgccgccttggcccaatcgcagtccgcagcctcagcatttagccaggcagcctcacaggccttctcacaagcggcttctcaggctggctctcaagccgcctcacaagctggtagtcaagccgcatcacaggcaggatcccaagctgcatctcaggctggatctcaagctgcctcccaagcaggtagccaggctgcttcgcaatctggtagtggagcttcctcatttacgactactatttctcgttcatctgctggtagtcagacgggtagtcaagctggttcacaagccggttcacaggctggatcacaagcaggtgactacaaagatgacgacgataaagattacaaagacgatgacgataaggactataaagatgatgacgacaaataataa

SEQ ID NO: 1454 - DNA, 2376 bp, synthetic construct
  misc_feature 1..2376: note = Description of Artificial Sequence: Synthetic polynucleotide
  source 1..2376: mol_type = other DNA
atgagatttccttcaatttttactgctgttttattcgcagcatcctccgcattagctgctccagtcaacactacaacagaagatgaaacggcacaaattccggctgaagctgtcatcggttactcagatttagaaggggatttcgatgttgctgttttgccattttccaacagcacaaataacgggttattgtttataaatactactattgccagcattgctgctaaagaagaaggggtatctctcgagaaaagagaggctgaagcaggtgctggagccggcgctggagctggcgccggagcaggctattcggccggcgctggttacggtattggagctggagccggagtgggcgctggtgctggtgcaggcgcaggtgccggatctggtaccggtactggagccggatatggttacggatcttcaacccaatctagctccaccatttacgctgctacctaccagggtggttatggacgagttgcaggcctgggtgccggagctggtgcaggtgcaggtgcaggaggaggtgcaggtgccggagcaggtacaggtgccggagctggagcaggaataggtgctggttatggtgctggcgcgggttatggagccggagctggaaccggctccggagcaggtgccggtgcaggaggaggcgcagcagctggtgctggttcgggtgttggtgcaggctacggtgcaggagctggctatggagccggagccggagccggtggtggagcaggtgcaggagccggaagcggtgcttcagcaggtgctggagccggcgctggagctggcgccggagcaggctattcggccggcgctggttacggtattggagctggagccggagtgggcgctggtgctggtgcaggcgcaggtgccggatctggtaccggtactggagccggatatggttacggatcttcaacccaatctagctccaccatttacgctgctacctaccagggtggttatggacgagttgcaggcctgggtgccggagctggtgcaggtgcaggtgcaggaggaggtgcaggtgccggagcaggtacaggtgccggagctggagcaggaataggtgctggttatggtgctggcgcgggttatggagccggagctggaaccggctccggagcaggtgccggtgcaggaggaggcgcagcagctggtgctggttcgggtgttggtgcaggctacggtgcaggagctggctatggagccggagccggagccggtggtggagcaggtgcaggagccggaagcggtgcttcagcaggtgctggagccggcgctggagctggcgccggagcaggctattcggccggcgctggttacggtattggagctggagccggagtgggcgctggtgctggtgcaggcgcaggtgccggatctggtaccggtactggagccggatatggttacggatcttcaacccaatctagctccaccatttacgctgctacctaccagggtggttatggacgagttgcaggcctgggtgccggagctggtgcaggtgcaggtgcaggaggaggtgcaggtgccggagcaggtacaggtgccggagctggagcaggaataggtgctggttatggtgctggcgcgggttatggagccggagctggaaccggctccggagcaggtgccggtgcaggaggaggcgcagcagctggtgctggttcgggtgttggtgcaggctacggtgcaggagctggctatggagccggagccggagccggtggtggagcaggtgcaggagccggaagcggtgcttcagcaggtgctggagccggcgctggagctggcgccggagcaggctattcggccggcgctggttacggtattggagctggagccggagtgggcgctggtgctggtgcaggcgcaggtgccggatctggtaccggtactggagccggatatggttacggatcttcaacccaatctagctccaccatttacgctgctacctaccagggtggttatggacgagttgcaggcctgggtgccggagctggtgcaggtgcaggtgcaggaggaggtgcaggtgccggagcaggtacaggtgccggagctggagcaggaataggtgctggttatggtgctggcgcgggttatggagccggagctggaaccggctccggagcaggtgccggtgcaggaggaggcgcagcagctggtgctggttcgggtgttggtgcaggctacggtgcaggagctggctatggagccggagccggagccggtggtggagcaggtgcaggagccggaagcggtgcttcagcaggtgactacaaagatgacgacgataaagattacaaagacgatgacgataaggactataaagatgatgacgacaaataataa

SEQ ID NO: 1455 - DNA, 2436 bp, synthetic construct
  misc_feature 1..2436: note = Description of Artificial Sequence: Synthetic polynucleotide
  source 1..2436: mol_type = other DNA
atgagatttccttcaatttttactgctgttttattcgcagcatcctccgcattagctgctccagtcaacactacaacagaagatgaaacggcacaaattccggctgaagctgtcatcggttactcagatttagaaggggatttcgatgttgctgttttgccattttccaacagcacaaataacgggttattgtttataaatactactattgccagcattgctgctaaagaagaaggggtatctctcgagaaaagagaggctgaagcaggtagtggatacggagcaggcgcaggtgctggtgccggcagtggttacggtgccggagccggtgctggaagcggttatggcgcaggagctggagctggtgctggctcaggctacgttgccggagcaggagcaggtgcaggtgctggttctggatatggagctggagcaggcgctggagctggttcctcatattccgctggtgcaggagccggtgctggttctggttatggcgctggtagttctgcttctgccggctcagccgtctcaacacaaactgtttccagttcagcaacgacctcgtcacagagtgccgcagctgctactggagcagcatacggtacccgagcatcaactggaagtggtgcttctgctggagctgcagcatcaggtgctggagctggttacggaggtcaggccggttatggtcaaggaggaggagctgcagcctatagagctggcgcaggatcccaggccgcttatggacaaggtgcctcgggctcatctggtgcggcagctgcagcaggtagtggatacggagcaggcgcaggtgctggtgccggcagtggttacggtgccggagccggtgctggaagcggttatggcgcaggagctggagctggtgctggctcaggctacgttgccggagcaggagcaggtgcaggtgctggttctggatatggagctggagcaggcgctggagctggttcctcatattccgctggtgcaggagccggtgctggttctggttatggcgctggtagttctgcttctgccggctcagccgtctcaacacaaactgtttccagttcagcaacgacctcgtcacagagtgccgcagctgctactggagcagcatacggtacccgagcatcaactggaagtggtgcttctgctggagctgcagcatcaggtgctggagctggttacggaggtcaggccggttatggtcaaggaggaggagctgcagcctatagagctggcgcaggatcccaggccgcttatggacaaggtgcctcgggctcatctggtgcggcagctgcagcaggtagtggatacggagcaggcgcaggtgctggtgccggcagtggttacggtgccggagccggtgctggaagcggttatggcgcaggagctggagctggtgctggctcaggctacgttgccggagcaggagcaggtgcaggtgctggttctggatatggagctggagcaggcgctggagctggttcctcatattccgctggtgcaggagccggtgctggttctggttatggcgctggtagttctgcttctgccggctcagccgtctcaacacaaactgtttccagttcagcaacgacctcgtcacagagtgccgcagctgctactggagcagcatacggtacccgagcatcaactggaagtggtgcttctgctggagctgcagcatcaggtgctggagctggttacggaggtcaggccggttatggtcaaggaggaggagctgcagcctatagagctggcgcaggatcccaggccgcttatggacaaggtgcctcgggctcatctggtgcggcagctgcagcaggtagtggatacggagcaggcgcaggtgctggtgccggcagtggttacggtgccggagccggtgctggaagcggttatggcgcaggagctggagctggtgctggctcaggctacgttgccggagcaggagcaggtgcaggtgctggttctggatatggagctggagcaggcgctggagctggttcctcatattccgctggtgcaggagccggtgctggttctggttatggcgctggtagttctgcttctgccggctcagccgtctcaacacaaactgtttccagttcagcaacgacctcgtcacagagtgccgcagctgctactggagcagcatacggtacccgagcatcaactggaagtggtgcttctgctggagctgcagcatcaggtgctggagctggttacggaggtcaggccggttatggtcaaggaggaggagctgcagcctatagagctggcgcaggatcccaggccgcttatggacaaggtgcctcgggctcatctggtgcggcagctgcagcaggtgactacaaagatgacgacgataaagattacaaagacgatgacgataaggactataaagatgatgacgacaaataataa

SEQ ID NO: 1456 - DNA, 2184 bp, synthetic construct
  misc_feature 1..2184: note = Description of Artificial Sequence: Synthetic polynucleotide
  source 1..2184: mol_type = other DNA
atgagatttccttcaatttttactgctgttttattcgcagcatcctccgcattagctgctccagtcaacactacaacagaagatgaaacggcacaaattccggctgaagctgtcatcggttactcagatttagaaggggatttcgatgttgctgttttgccattttccaacagcacaaataacgggttattgtttataaatactactattgccagcattgctgctaaagaagaaggggtatctctcgagaaaagagaggctgaagcaggtgctggcgccggcggagctggaggttatggacgaggcgccggagcaggtgccggagctgctgctggagcaggtgctggtgctgctgcaggtgcgggcgcaggtggttacggtggtcaaggcggctacggagctggtgccggagcaggtgctgctgcagctgctggcgccggagcaggaggcgctggaggatacggaaggggcgctggtgctggagctggtgtcgcagcaggtgcaggcgccggaggatacggtggacaaggtggatatggagccggtgcgggagcgggagcagcagctgccgcagctactggtgcaggtggtgctggtggttatggtcgtggagctggtgctggagcaggagctgcagcaggagctggagccggtactggtggcgctggatacggaggtcagggaggttacggagctggcgccggagctggagctgccgctgctgcaggtgctggcgccggcggagctggaggttatggacgaggcgccggagcaggtgccggagctgctgctggagcaggtgctggtgctgctgcaggtgcgggcgcaggtggttacggtggtcaaggcggctacggagctggtgccggagcaggtgctgctgcagctgctggcgccggagcaggaggcgctggaggatacggaaggggcgctggtgctggagctggtgtcgcagcaggtgcaggcgccggaggatacggtggacaaggtggatatggagccggtgcgggagcgggagcagcagctgccgcagctactggtgcaggtggtgctggtggttatggtcgtggagctggtgctggagcaggagctgcagcaggagctggagccggtactggtggcgctggatacggaggtcagggaggttacggagctggcgccggagctggagctgccgctgctgcaggtgctggcgccggcggagctggaggttatggacgaggcgccggagcaggtgccggagctgctgctggagcaggtgctggtgctgctgcaggtgcgggcgcaggtggttacggtggtcaaggcggctacggagctggtgccggagcaggtgctgctgcagctgctggcgccggagcaggaggcgctggaggatacggaaggggcgctggtgctggagctggtgtcgcagcaggtgcaggcgccggaggatacggtggacaaggtggatatggagccggtgcgggagcgggagcagcagctgccgcagctactggtgcaggtggtgctggtggttatggtcgtggagctggtgctggagcaggagctgcagcaggagctggagccggtactggtggcgctggatacggaggtcagggaggttacggagctggcgccggagctggagctgccgctgctgcaggtgctggcgccggcggagctggaggttatggacgaggcgccggagcaggtgccggagctgctgctggagcaggtgctggtgctgctgcaggtgcgggcgcaggtggttacggtggtcaaggcggctacggagctggtgccggagcaggtgctgctgcagctgctggcgccggagcaggaggcgctggaggatacggaaggggcgctggtgctggagctggtgtcgcagcaggtgcaggcgccggaggatacggtggacaaggtggatatggagccggtgcgggagcgggagcagcagctgccgcagctactggtgcaggtggtgctggtggttatggtcgtggagctggtgctggagcaggagctgcagcaggagctggagccggtactggtggcgctggatacggaggtcagggaggttacggagctggcgccggagctggagctgccgctgctgcaggtgactacaaagatgacgacgataaagattacaaagacgatgacgataaggactataaagatgatgacgacaaataataa

SEQ ID NO: 1457 - DNA, 3216 bp, synthetic construct
  misc_feature 1..3216: note = Description of Artificial Sequence: Synthetic polynucleotide
  source 1..3216: mol_type = other DNA
atgagatttccttcaatttttactgctgttttattcgcagcatcctccgcattagctgctccagtcaacactacaacagaagatgaaacggcacaaattccggctgaagctgtcatcggttactcagatttagaaggggatttcgatgttgctgttttgccattttccaacagcacaaataacgggttattgtttataaatactactattgccagcattgctgctaaagaagaaggggtatctctcgagaaaagagaggctgaagcaggtgctgcgcagaaacagccatcaggagagtctagtgttgccactgcaagcgcggctgcaacctcagtgacctcaggtggagcaccagttggaaagccaggtgtcccagcaccaatattttaccctcaaggtccgttacagcagggacctgcacctggaccttccaacgtccagcctggtacctctcagcaaggtccgatcggtggcgttggtggctcaaatgcgttttcgtcgtcattcgccagtgccttatccctaaaccgaggttttacagaagttatcagctctgcttccgcaacggctgttgcaagtgcttttcagaagggtctagctccatatggaactgccttcgctctgtcagcagcttccgcggctgctgatgcgtacaacagcattggatccggagctaatgcattcgcatatgctcaagcttttgctagagttctgtatccattggtcagacaatatggactatctagctctggtaaagcatctgcgttcgcctcagctattgcttcttctttctcttccggtacttctggacaaggaccgtccattggacagcaacaaccaccagtaactatttctgccgcctcggcctcagctggagcttcagctgcagccgtaggaggtggtcaagttggtcagggaccgtatggtggacaacaacaatccactgctgcctcagccagtgctgcagcagctactgccacatcaggtgctgcgcagaaacagccatcaggagagtctagtgttgccactgcaagcgcggctgcaacctcagtgacctcaggtggagcaccagttggaaagccaggtgtcccagcaccaatattttaccctcaaggtccgttacagcagggacctgcacctggaccttccaacgtccagcctggtacctctcagcaaggtccgatcggtggcgttggtggctcaaatgcgttttcgtcgtcattcgccagtgccttatccctaaaccgaggttttacagaagttatcagctctgcttccgcaacggctgttgcaagtgcttttcagaagggtctagctccatatggaactgccttcgctctgtcagcagcttccgcggctgctgatgcgtacaacagcattggatccggagctaatgcattcgcatatgctcaagcttttgctagagttctgtatccattggtcagacaatatggactatctagctctggtaaagcatctgcgttcgcctcagctattgcttcttctttctcttccggtacttctggacaaggaccgtccattggacagcaacaaccaccagtaactatttctgccgcctcggcctcagctggagcttcagctgcagccgtaggaggtggtcaagttggtcagggaccgtatggtggacaacaacaatccactgctgcctcagccagtgctgcagcagctactgccacatcaggtgctgcgcagaaacagccatcaggagagtctagtgttgccactgcaagcgcggctgcaacctcagtgacctcaggtggagcaccagttggaaagccaggtgtcccagcaccaatattttaccctcaaggtccgttacagcagggacctgcacctggaccttccaacgtccagcctggtacctctcagcaaggtccgatcggtggcgttggtggctcaaatgcgttttcgtcgtcattcgccagtgccttatccctaaaccgaggttttacagaagttatcagctctgcttccgcaacggctgttgcaagtgcttttcagaagggtctagctccatatggaactgccttcgctctgtcagcagcttccgcggctgctgatgcgtacaacagcattggatccggagctaatgcattcgcatatgctcaagcttttgctagagttctgtatccattggtcagacaatatggactatctagctctggtaaagcatctgcgttcgcctcagctattgcttcttctttctcttccggtacttctggacaaggaccgtccattggacagcaacaaccaccagtaactatttctgccgcctcggcctcagctggagcttcagctgcagccgtaggaggtggtcaagttggtcagggaccgtatggtggacaacaacaatccactgctgcctcagccagtgctgcagcagctactgccacatcaggtgctgcgcagaaacagccatcaggagagtctagtgttgccactgcaagcgcggctgcaacctcagtgacctcaggtggagcaccagttggaaagccaggtgtcccagcaccaatattttaccctcaaggtccgttacagcagggacctgcacctggaccttccaacgtccagcctggtacctctcagcaaggtccgatcggtggcgttggtggctcaaatgcgttttcgtcgtcattcgccagtgccttatccctaaaccgaggttttacagaagttatcagctctgcttccgcaacggctgttgcaagtgcttttcagaagggtctagctccatatggaactgccttcgctctgtcagcagcttccgcggctgctgatgcgtacaacagcattggatccggagctaatgcattcgcatatgctcaagcttttgctagagttctgtatccattggtcagacaatatggactatctagctctggtaaagcatctgcgttcgcctcagctattgcttcttctttctcttccggtacttctggacaaggaccgtccattggacagcaacaaccaccagtaactatttctgccgcctcggcctcagctggagcttcagctgcagccgtaggaggtggtcaagttggtcagggaccgtatggtggacaacaacaatccactgctgcctcagccagtgctgcagcagctactgccacatcaggtgactacaaagatgacgacgataaagattacaaagacgatgacgataaggactataaagatgatgacgacaaataataa

SEQ ID NO: 1458 - DNA, 3564 bp, synthetic construct
  misc_feature 1..3564: note = Description of Artificial Sequence: Synthetic polynucleotide
  source 1..3564: mol_type = other DNA
atgagatttccttcaatttttactgctgttttattcgcagcatcctccgcattagctgctccagtcaacactacaacagaagatgaaacggcacaaattccggctgaagctgtcatcggttactcagatttagaaggggatttcgatgttgctgttttgccattttccaacagcacaaataacgggttattgtttataaatactactattgccagcattgctgctaaagaagaaggggtatctctcgagaaaagagaggctgaagcaggtggcgcaccaggtggtggaccaggaggtgccggtccgggcggtgccggatttggacccggaggaggagccggattcggccctggaggaggtgccggtttcggcccaggaggtgctgccggaggaccaggtggtcctggtggacctggaggtccaggtggagctggtggatacggtccaggaggagctggaggatacggaccaggaggtgtcggtcctggtggagctggaggatatggacctggaggtgctggaggttacggtccaggaggttccggtccaggtggtgccggaccgggtggtgccggtggcgagggtccggttactgtagacgttgatgttactgttggacctgaaggagtgggaggaggaccaggtggcgccggtccaggaggtgcaggattcggcccaggtggcggagcgggtttcggtccaggtggcgcccctggagccccaggaggaccaggaggtcctggaggaccgggtggtccaggaggtccaggaggtgtaggaccgggtggagctggaggttacggccctggtggtgctggtggagtaggaccggctggtactggaggattcggtcctggaggagccggtggttttggacctggtggagcaggaggttttggtcctggaggagcaggtggattcggaccaggaggtgctggaggatatggtccaggtggtgttggtcctggtggtgcaggaggttttggacctggaggagttggtccaggaggatcaggacccggaggagctggtggtgaaggaccagtaacagtagatgtagacgtctcagtaggtggcgcaccaggtggtggaccaggaggtgccggtccgggcggtgccggatttggacccggaggaggagccggattcggccctggaggaggtgccggtttcggcccaggaggtgctgccggaggaccaggtggtcctggtggacctggaggtccaggtggagctggtggatacggtccaggaggagctggaggatacggaccaggaggtgtcggtcctggtggagctggaggatatggacctggaggtgctggaggttacggtccaggaggttccggtccaggtggtgccggaccgggtggtgccggtggcgagggtccggttactgtagacgttgatgttactgttggacctgaaggagtgggaggaggaccaggtggcgccggtccaggaggtgcaggattcggcccaggtggcggagcgggtttcggtccaggtggcgcccctggagccccaggaggaccaggaggtcctggaggaccgggtggtccaggaggtccaggaggtgtaggaccgggtggagctggaggttacggccctggtggtgctggtggagtaggaccggctggtactggaggattcggtcctggaggagccggtggttttggacctggtggagcaggaggttttggtcctggaggagcaggtggattcggaccaggaggtgctggaggatatggtccaggtggtgttggtcctggtggtgcaggaggttttggacctggaggagttggtccaggaggatcaggacccggaggagctggtggtgaaggaccagtaacagtagatgtagacgtctcagtaggtggcgcaccaggtggtggaccaggaggtgccggtccgggcggtgccggatttggacccggaggaggagccggattcggccctggaggaggtgccggtttcggcccaggaggtgctgccggaggaccaggtggtcctggtggacctggaggtccaggtggagctggtggatacggtccaggaggagctggaggatacggaccaggaggtgtcggtcctggtggagctggaggatatggacctggaggtgctggaggttacggtccaggaggttccggtccaggtggtgccggaccgggtggtgccggtggcgagggtccggttactgtagacgttgatgttactgttggacctgaaggagtgggaggaggaccaggtggcgccggtccaggaggtgcaggattcggcccaggtggcggagcgggtttcggtccaggtggcgcccctggagccccaggaggaccaggaggtcctggaggaccgggtggtccaggaggtccaggaggtgtaggaccgggtggagctggaggttacggccctggtggtgctggtggagtaggaccggctggtactggaggattcggtcctggaggagccggtggttttggacctggtggagcaggaggttttggtcctggaggagcaggtggattcggaccaggaggtgctggaggatatggtccaggtggtgttggtcctggtggtgcaggaggttttggacctggaggagttggtccaggaggatcaggacccggaggagctggtggtgaaggaccagtaacagtagatgtagacgtctcagtaggtggcgcaccaggtggtggaccaggaggtgccggtccgggcggtgccggatttggacccggaggaggagccggattcggccctggaggaggtgccggtttcggcccaggaggtgctgccggaggaccaggtggtcctggtggacctggaggtccaggtggagctggtggatacggtccaggaggagctggaggatacggaccaggaggtgtcggtcctggtggagctggaggatatggacctggaggtgctggaggttacggtccaggaggttccggtccaggtggtgccggaccgggtggtgccggtggcgagggtccggttactgtagacgttgatgttactgttggacctgaaggagtgggaggaggaccaggtggcgccggtccaggaggtgcaggattcggcccaggtggcggagcgggtttcggtccaggtggcgcccctggagccccaggaggaccaggaggtcctggaggaccgggtggtccaggaggtccaggaggtgtaggaccgggtggagctggaggttacggccctggtggtgctggtggagtaggaccggctggtactggaggattcggtcctggaggagccggtggttttggacctggtggagcaggaggttttggtcctggaggagcaggtggattcggaccaggaggtgctggaggatatggtccaggtggtgttggtcctggtggtgcaggaggttttggacctggaggagttggtccaggaggatcaggacccggaggagctggtggtgaaggaccagtaacagtagatgtagacgtctcagtaggtgactacaaagatgacgacgataaagattacaaagacgatgacgataaggactataaagatgatgacgacaaataataa

SEQ ID NO: 1459 - DNA, 2472 bp, synthetic construct
  misc_feature 1..2472: note = Description of Artificial Sequence: Synthetic polynucleotide
  source 1..2472: mol_type = other DNA
atgagatttccttcaatttttactgctgttttattcgcagcatcctccgcattagctgctccagtcaacactacaacagaagatgaaacggcacaaattccggctgaagctgtcatcggttactcagatttagaaggggatttcgatgttgctgttttgccattttccaacagcacaaataacgggttattgtttataaatactactattgccagcattgctgctaaagaagaaggggtatctctcgagaaaagagaggctgaagcaggtagtggtgctgcgagggccgctcagacagcctccgccgcttccgctgcatctgcttcgagttcacttcagcagtcacttggttccgcactcgctcaaagctcaagttttgcggctgcgtttgaccaggctaactcagccgcttcggctgctgcaatcgcttacgccctggctcaatctgctgcaaaccaagtaggactgagctcatattctgcagctatttctaatgctgcggcagctgctgtgggttccgtcggaggctacgcttctgcttcggcttatgcttttgcgtttgcatctggagtttcacaagtgttgagtaactacggattaattaatctatctaacgcattgtttttggccagtagtattgcaaatgcagcaagtgcaagtgcatcctctgccgcagccgcagctagttcttcgagcgcagctacgggcgccgctgctgcactgggtggtgccggtagtgctgcagcaacctccacgactactatcacttcgacctctacggcggtggcagcagcttcaggtagtggtgctgcgagggccgctcagacagcctccgccgcttccgctgcatctgcttcgagttcacttcagcagtcacttggttccgcactcgctcaaagctcaagttttgcggctgcgtttgaccaggctaactcagccgcttcggctgctgcaatcgcttacgccctggctcaatctgctgcaaaccaagtaggactgagctcatattctgcagctatttctaatgctgcggcagctgctgtgggttccgtcggaggctacgcttctgcttcggcttatgcttttgcgtttgcatctggagtttcacaagtgttgagtaactacggattaattaatctatctaacgcattgtttttggccagtagtattgcaaatgcagcaagtgcaagtgcatcctctgccgcagccgcagctagttcttcgagcgcagctacgggcgccgctgctgcactgggtggtgccggtagtgctgcagcaacctccacgactactatcacttcgacctctacggcggtggcagcagcttcaggtagtggtgctgcgagggccgctcagacagcctccgccgcttccgctgcatctgcttcgagttcacttcagcagtcacttggttccgcactcgctcaaagctcaagttttgcggctgcgtttgaccaggctaactcagccgcttcggctgctgcaatcgcttacgccctggctcaatctgctgcaaaccaagtaggactgagctcatattctgcagctatttctaatgctgcggcagctgctgtgggttccgtcggaggctacgcttctgcttcggcttatgcttttgcgtttgcatctggagtttcacaagtgttgagtaactacggattaattaatctatctaacgcattgtttttggccagtagtattgcaaatgcagcaagtgcaagtgcatcctctgccgcagccgcagctagttcttcgagcgcagctacgggcgccgctgctgcactgggtggtgccggtagtgctgcagcaacctccacgactactatcacttcgacctctacggcggtggcagcagcttcaggtagtggtgctgcgagggccgctcagacagcctccgccgcttccgctgcatctgcttcgagttcacttcagcagtcacttggttccgcactcgctcaaagctcaagttttgcggctgcgtttgaccaggctaactcagccgcttcggctgctgcaatcgcttacgccctggctcaatctgctgcaaaccaagtaggactgagctcatattctgcagctatttctaatgctgcggcagctgctgtgggttccgtcggaggctacgcttctgcttcggcttatgcttttgcgtttgcatctggagtttcacaagtgttgagtaactacggattaattaatctatctaacgcattgtttttggccagtagtattgcaaatgcagcaagtgcaagtgcatcctctgccgcagccgcagctagttcttcgagcgcagctacgggcgccgctgctgcactgggtggtgccggtagtgctgcagcaacctccacgactactatcacttcgacctctacggcggtggcagcagcttcaggtgactacaaagatgacgacgataaagattacaaagacgatgacgataaggactataaagatgatgacgacaaataataa

SEQ ID NO: 1460 - DNA, 3576 bp, synthetic construct
  misc_feature 1..3576: note = Description of Artificial Sequence: Synthetic polynucleotide
  source 1..3576: mol_type = other DNA
atgagatttccttcaatttttactgctgttttattcgcagcatcctccgcattagctgctccagtcaacactacaacagaagatgaaacggcacaaattccggctgaagctgtcatcggttactcagatttagaaggggatttcgatgttgctgttttgccattttccaacagcacaaataacgggttattgtttataaatactactattgccagcattgctgctaaagaagaaggggtatctctcgagaaaagagaggctgaagcaggtgcaggtggctcaggccctggtggagcaggacctggaggtgccggtcctggaggcgctggacccggcggtgttggaccgggaggagctggaggacctggtggagccggcggtccatttggaccaggtggttccggaccaggtggcgctggtggcgctggtggtccatacggccctggcggagcttatggtccaggtggccctggtggtccaggtggtcctggtggcccaggctctggtggtccttacggaccaggtggagcttacggaccgggtggagcatatggtccaggaggagcatatggaccaggcggagccggaggtccatacggaccaggtggtccttacggccccggaggaccttacggtcccggtggtgcaggtggacccggaggcgccggtggtccatacggacccggtggtgctggtccgggtggatacggtccaggaggcgcaggtccaggaggttatggaccaggcggttctggacctggaggtgcaggacccggtggatatggacccggtggatccggacctggcggagccggacctggtggatatggacctggtggtgcaggtccaggcggttacggacctggtggcgctggacctggcggtgctggtcctggaggtgctggacctggcggatatggcccaggtggttctggtcctggaggacctggttcaggaggaccgggtggagccggaggatcaggcggtacaacagtcatcgaagatttagatattaccgtcaacggcccgggcggaccaatcacaatttctgaagagttgactgtaggaggtccaggtgcaggtggctcaggccctggtggagcaggacctggaggtgccggtcctggaggcgctggacccggcggtgttggaccgggaggagctggaggacctggtggagccggcggtccatttggaccaggtggttccggaccaggtggcgctggtggcgctggtggtccatacggccctggcggagcttatggtccaggtggccctggtggtccaggtggtcctggtggcccaggctctggtggtccttacggaccaggtggagcttacggaccgggtggagcatatggtccaggaggagcatatggaccaggcggagccggaggtccatacggaccaggtggtccttacggccccggaggaccttacggtcccggtggtgcaggtggacccggaggcgccggtggtccatacggacccggtggtgctggtccgggtggatacggtccaggaggcgcaggtccaggaggttatggaccaggcggttctggacctggaggtgcaggacccggtggatatggacccggtggatccggacctggcggagccggacctggtggatatggacctggtggtgcaggtccaggcggttacggacctggtggcgctggacctggcggtgctggtcctggaggtgctggacctggcggatatggcccaggtggttctggtcctggaggacctggttcaggaggaccgggtggagccggaggatcaggcggtacaacagtcatcgaagatttagatattaccgtcaacggcccgggcggaccaatcacaatttctgaagagttgactgtaggaggtccaggtgcaggtggctcaggccctggtggagcaggacctggaggtgccggtcctggaggcgctggacccggcggtgttggaccgggaggagctggaggacctggtggagccggcggtccatttggaccaggtggttccggaccaggtggcgctggtggcgctggtggtccatacggccctggcggagcttatggtccaggtggccctggtggtccaggtggtcctggtggcccaggctctggtggtccttacggaccaggtggagcttacggaccgggtggagcatatggtccaggaggagcatatggaccaggcggagccggaggtccatacggaccaggtggtccttacggccccggaggaccttacggtcccggtggtgcaggtggacccggaggcgccggtggtccatacggacccggtggtgctggtccgggtggatacggtccaggaggcgcaggtccaggaggttatggaccaggcggttctggacctggaggtgcaggacccggtggatatggacccggtggatccggacctggcggagccggacctggtggatatggacctggtggtgcaggtccaggcggttacggacctggtggcgctggacctggcggtgctggtcctggaggtgctggacctggcggatatggcccaggtggttctggtcctggaggacctggttcaggaggaccgggtggagccggaggatcaggcggtacaacagtcatcgaagatttagatattaccgtcaacggcccgggcggaccaatcacaatttctgaagagttgactgtaggaggtccaggtgcaggtggctcaggccctggtggagcaggacctggaggtgccggtcctggaggcgctggacccggcggtgttggaccgggaggagctggaggacctggtggagccggcggtccatttggaccaggtggttccggaccaggtggcgctggtggcgctggtggtccatacggccctggcggagcttatggtccaggtggccctggtggtccaggtggtcctggtggcccaggctctggtggtccttacggaccaggtggagcttacggaccgggtggagcatatggtccaggaggagcatatggaccaggcggagccggaggtccatacggaccaggtggtccttacggccccggaggaccttacggtcccggtggtgcaggtggacccggaggcgccggtggtccatacggacccggtggtgctggtccgggtggatacggtccaggaggcgcaggtccaggaggttatggaccaggcggttctggacctggaggtgcaggacccggtggatatggacccggtggatccggacctggcggagccggacctggtggatatggacctggtggtgcaggtccaggcggttacggacctggtggcgctggacctggcggtgctggtcctggaggtgctggacctggcggatatggcccaggtggttctggtcctggaggacctggttcaggaggaccgggtggagccggaggatcaggcggtacaacagtcatcgaagatttagatattaccgtcaacggcccgggcggaccaatcacaatttctgaagagttgactgtaggaggtccaggtgactacaaagatgacgacgataaagattacaaagacgatgacgataaggactataaagatgatgacgacaaataataa

SEQ ID NO: 1461 - DNA, 2460 bp, synthetic construct
  misc_feature 1..2460: note = Description of Artificial Sequence: Synthetic polynucleotide
  source 1..2460: mol_type = other DNA
atgagatttccttcaatttttactgctgttttattcgcagcatcctccgcattagctgctccagtcaacactacaacagaagatgaaacggcacaaattccggctgaagctgtcatcggttactcagatttagaaggggatttcgatgttgctgttttgccattttccaacagcacaaataacgggttattgtttataaatactactattgccagcattgctgctaaagaagaaggggtatctctcgagaaaagagaggctgaagcaggttcacaagctgcaagtcagtccgctagtagctcggctagtcaggcttctgctagctcttttgcacaggcttcctccgcttcccttgcagccagttcatcttttagtagtgctttttcaagtgcaacatccttaagtgccttgggcaatgttgcttatcaactgggtttcgacgtcggtacaaacctaggtttgacaaatgcagccggtctagctgctgccttctctcaagctgcctcctcagtaggtgttggtggttcatctggagcttatgccaacgctttgtcgaatgccgcggcacaatttttgtcggctcaaggtatcttaaacacggtcaatgctggttctttagcctcttcttttgcatccgctctttcgtcagtcgcagcatctgctgctgcccaggccagttcacaatctcaagcagcttccagcgcgttctcacgagcagcaagtcaatcagcttcacagagtgctgccaggtctggagctcaatcttccagtagtacaacaactacttcctcctcaggttcacaagctgcaagtcagtccgctagtagctcggctagtcaggcttctgctagctcttttgcacaggcttcctccgcttcccttgcagccagttcatcttttagtagtgctttttcaagtgcaacatccttaagtgccttgggcaatgttgcttatcaactgggtttcgacgtcggtacaaacctaggtttgacaaatgcagccggtctagctgctgccttctctcaagctgcctcctcagtaggtgttggtggttcatctggagcttatgccaacgctttgtcgaatgccgcggcacaatttttgtcggctcaaggtatcttaaacacggtcaatgctggttctttagcctcttcttttgcatccgctctttcgtcagtcgcagcatctgctgctgcccaggccagttcacaatctcaagcagcttccagcgcgttctcacgagcagcaagtcaatcagcttcacagagtgctgccaggtctggagctcaatcttccagtagtacaacaactacttcctcctcaggttcacaagctgcaagtcagtccgctagtagctcggctagtcaggcttctgctagctcttttgcacaggcttcctccgcttcccttgcagccagttcatcttttagtagtgctttttcaagtgcaacatccttaagtgccttgggcaatgttgcttatcaactgggtttcgacgtcggtacaaacctaggtttgacaaatgcagccggtctagctgctgccttctctcaagctgcctcctcagtaggtgttggtggttcatctggagcttatgccaacgctttgtcgaatgccgcggcacaatttttgtcggctcaaggtatcttaaacacggtcaatgctggttctttagcctcttcttttgcatccgctctttcgtcagtcgcagcatctgctgctgcccaggccagttcacaatctcaagcagcttccagcgcgttctcacgagcagcaagtcaatcagcttcacagagtgctgccaggtctggagctcaatcttccagtagtacaacaactacttcctcctcaggttcacaagctgcaagtcagtccgctagtagctcggctagtcaggcttctgctagctcttttgcacaggcttcctccgcttcccttgcagccagttcatcttttagtagtgctttttcaagtgcaacatccttaagtgccttgggcaatgttgcttatcaactgggtttcgacgtcggtacaaacctaggtttgacaaatgcagccggtctagctgctgccttctctcaagctgcctcctcagtaggtgttggtggttcatctggagcttatgccaacgctttgtcgaatgccgcggcacaatttttgtcggctcaaggtatcttaaacacggtcaatgctggttctttagcctcttcttttgcatccgctctttcgtcagtcgcagcatctgctgctgcccaggccagttcacaatctcaagcagcttccagcgcgttctcacgagcagcaagtcaatcagcttcacagagtgctgccaggtctggagctcaatcttccagtagtacaacaactacttcctcctcaggtgactacaaagatgacgacgataaagattacaaagacgatgacgataaggactataaagatgatgacgacaaataataa

SEQ ID NO: 1462 - DNA, 3144 bp, synthetic construct
  misc_feature 1..3144: note = Description of Artificial Sequence: Synthetic polynucleotide
  source 1..3144: mol_type = other DNA
atgagatttccttcaatttttactgctgttttattcgcagcatcctccgcattagctgctccagtcaacactacaacagaagatgaaacggcacaaattccggctgaagctgtcatcggttactcagatttagaaggggatttcgatgttgctgttttgccattttccaacagcacaaataacgggttattgtttataaatactactattgccagcattgctgctaaagaagaaggggtatctctcgagaaaagagaggctgaagcaggtggatttggtccaggtggcgcaggccctggaggtgcaggccctggtggagcaggtcctggtggagctggccctggaggtgccggccctggaggagcaggtccaggtggcgctggacctggcggcgctggacctggtggagccggtggtgctggcggtgctggcggtgccggaggatcaggaggcgcgggaggcagcggtggaactactattatcgaagatttagacatcaccattgatggagctgatggccctatcacaatttccgaagaattgactatatccggtgcaggtggcagtggaccaggaggagctggtcctggtggagttggaccaggtggaagcggacctggtggtgttggcccaggtggtagtggtcctggaggagttggtccgggaggatccggacccggaggtgtcggtcctggtggagccggaggtccatacggaccgggtggatccggacctggcggcgccggtggagctggaggacctggtggtgcatatggaccaggtggatcctatggaccaggaggaagtggtggccccggtggagctggtggcccatacggaccaggaggcgaaggaccaggtggagcaggtggcccttacggaccaggtggtgccggaggtccttacggtcctggtggcgccggaggtccatatggtccaggcggtgaaggtggcccttatggtccaggtggatttggtccaggtggcgcaggccctggaggtgcaggccctggtggagcaggtcctggtggagctggccctggaggtgccggccctggaggagcaggtccaggtggcgctggacctggcggcgctggacctggtggagccggtggtgctggcggtgctggcggtgccggaggatcaggaggcgcgggaggcagcggtggaactactattatcgaagatttagacatcaccattgatggagctgatggccctatcacaatttccgaagaattgactatatccggtgcaggtggcagtggaccaggaggagctggtcctggtggagttggaccaggtggaagcggacctggtggtgttggcccaggtggtagtggtcctggaggagttggtccgggaggatccggacccggaggtgtcggtcctggtggagccggaggtccatacggaccgggtggatccggacctggcggcgccggtggagctggaggacctggtggtgcatatggaccaggtggatcctatggaccaggaggaagtggtggccccggtggagctggtggcccatacggaccaggaggcgaaggaccaggtggagcaggtggcccttacggaccaggtggtgccggaggtccttacggtcctggtggcgccggaggtccatatggtccaggcggtgaaggtggcccttatggtccaggtggatttggtccaggtggcgcaggccctggaggtgcaggccctggtggagcaggtcctggtggagctggccctggaggtgccggccctggaggagcaggtccaggtggcgctggacctggcggcgctggacctggtggagccggtggtgctggcggtgctggcggtgccggaggatcaggaggcgcgggaggcagcggtggaactactattatcgaagatttagacatcaccattgatggagctgatggccctatcacaatttccgaagaattgactatatccggtgcaggtggcagtggaccaggaggagctggtcctggtggagttggaccaggtggaagcggacctggtggtgttggcccaggtggtagtggtcctggaggagttggtccgggaggatccggacccggaggtgtcggtcctggtggagccggaggtccatacggaccgggtggatccggacctggcggcgccggtggagctggaggacctggtggtgcatatggaccaggtggatcctatggaccaggaggaagtggtggccccggtggagctggtggcccatacggaccaggaggcgaaggaccaggtggagcaggtggcccttacggaccaggtggtgccggaggtccttacggtcctggtggcgccggaggtccatatggtccaggcggtgaaggtggcccttatggtccaggtggatttggtccaggtggcgcaggccctggaggtgcaggccctggtggagcaggtcctggtggagctggccctggaggtgccggccctggaggagcaggtccaggtggcgctggacctggcggcgctggacctggtggagccggtggtgctggcggtgctggcggtgccggaggatcaggaggcgcgggaggcagcggtggaactactattatcgaagatttagacatcaccattgatggagctgatggccctatcacaatttccgaagaattgactatatccggtgcaggtggcagtggaccaggaggagctggtcctggtggagttggaccaggtggaagcggacctggtggtgttggcccaggtggtagtggtcctggaggagttggtccgggaggatccggacccggaggtgtcggtcctggtggagccggaggtccatacggaccgggtggatccggacctggcggcgccggtggagctggaggacctggtggtgcatatggaccaggtggatcctatggaccaggaggaagtggtggccccggtggagctggtggcccatacggaccaggaggcgaaggaccaggtggagcaggtggcccttacggaccaggtggtgccggaggtccttacggtcctggtggcgccggaggtccatatggtccaggcggtgaaggtggcccttatggtccaggtgactacaaagatgacgacgataaagattacaaagacgatgacgataaggactataaagatgatgacgacaaataataa

SEQ ID NO: 1463 - DNA, 2532 bp, synthetic construct
  misc_feature 1..2532: note = Description of Artificial Sequence: Synthetic polynucleotide
  source 1..2532: mol_type = other DNA
atgagatttccttcaatttttactgctgttttattcgcagcatcctccgcattagctgctccagtcaacactacaacagaagatgaaacggcacaaattccggctgaagctgtcatcggttactcagatttagaaggggatttcgatgttgctgttttgccattttccaacagcacaaataacgggttattgtttataaatactactattgccagcattgctgctaaagaagaaggggtatctctcgagaaaagagaggctgaagcaggtgaagctttctccgcttcatcggctagttcggctgttgtattcgaaagcgctggacctggtgaagaggccggttcttcaggtggaggagcttcagcggccgcatctgctgctgctgctgcaggagctggatctggtagaagaggtccgggtggagccagaagcagaggaggagctggtgctggtgcaggcgcgggatctggtgttggaggatatggatcgggcagcggagccggagctggcgctggtgccggtgccggtgccggaggtgaaggcggctttggtgagggtcaaggttacggcgctggtgcaggtgctggctttggttccggagctggagcgggagccggagcaggttccggtgcaggagctggagaaggagtaggtagcggtgcaggagcaggtgcgggtgctggctttggagtaggagccggtgccggagctggagcaggagctggttttggctcaggcgctggagctggatctggcgctggagcaggatacggtgctggccgtgctggaggaagaggacgtggaggcagaggaggtgaagctttctccgcttcatcggctagttcggctgttgtattcgaaagcgctggacctggtgaagaggccggttcttcaggtggaggagcttcagcggccgcatctgctgctgctgctgcaggagctggatctggtagaagaggtccgggtggagccagaagcagaggaggagctggtgctggtgcaggcgcgggatctggtgttggaggatatggatcgggcagcggagccggagctggcgctggtgccggtgccggtgccggaggtgaaggcggctttggtgagggtcaaggttacggcgctggtgcaggtgctggctttggttccggagctggagcgggagccggagcaggttccggtgcaggagctggagaaggagtaggtagcggtgcaggagcaggtgcgggtgctggctttggagtaggagccggtgccggagctggagcaggagctggttttggctcaggcgctggagctggatctggcgctggagcaggatacggtgctggccgtgctggaggaagaggacgtggaggcagaggaggtgaagctttctccgcttcatcggctagttcggctgttgtattcgaaagcgctggacctggtgaagaggccggttcttcaggtggaggagcttcagcggccgcatctgctgctgctgctgcaggagctggatctggtagaagaggtccgggtggagccagaagcagaggaggagctggtgctggtgcaggcgcgggatctggtgttggaggatatggatcgggcagcggagccggagctggcgctggtgccggtgccggtgccggaggtgaaggcggctttggtgagggtcaaggttacggcgctggtgcaggtgctggctttggttccggagctggagcgggagccggagcaggttccggtgcaggagctggagaaggagtaggtagcggtgcaggagcaggtgcgggtgctggctttggagtaggagccggtgccggagctggagcaggagctggttttggctcaggcgctggagctggatctggcgctggagcaggatacggtgctggccgtgctggaggaagaggacgtggaggcagaggaggtgaagctttctccgcttcatcggctagttcggctgttgtattcgaaagcgctggacctggtgaagaggccggttcttcaggtggaggagcttcagcggccgcatctgctgctgctgctgcaggagctggatctggtagaagaggtccgggtggagccagaagcagaggaggagctggtgctggtgcaggcgcgggatctggtgttggaggatatggatcgggcagcggagccggagctggcgctggtgccggtgccggtgccggaggtgaaggcggctttggtgagggtcaaggttacggcgctggtgcaggtgctggctttggttccggagctggagcgggagccggagcaggttccggtgcaggagctggagaaggagtaggtagcggtgcaggagcaggtgcgggtgctggctttggagtaggagccggtgccggagctggagcaggagctggttttggctcaggcgctggagctggatctggcgctggagcaggatacggtgctggccgtgctggaggaagaggacgtggaggcagaggaggtgactacaaagatgacgacgataaagattacaaagacgatgacgataaggactataaagatgatgacgacaaataataa

SEQ ID NO: 1464 - DNA, 3360 bp, synthetic construct
  misc_feature 1..3360: note = Description of Artificial Sequence: Synthetic polynucleotide
  source 1..3360: mol_type = other DNA
atgagatttccttcaatttttactgctgttttattcgcagcatcctccgcattagctgctccagtcaacactacaacagaagatgaaacggcacaaattccggctgaagctgtcatcggttactcagatttagaaggggatttcgatgttgctgttttgccattttccaacagcacaaataacgggttattgtttataaatactactattgccagcattgctgctaaagaagaaggggtatctctcgagaaaagagaggctgaagcaggtggttacggtcccggagctggacaacaaggacccggaggtgccggacagcaaggacctggttctcaaggacctggaggtcaaggaccatatggcccaggagccggacaacaaggtcctggtagccagggaccaggttcgggtggtcaacaaggtccgggaggtcaaggcccatacggtccatccgcagctgcagcagcagctgctgccggcggttatggtcctggtgccggccagcaaggaccaggttcacagggcccaggttctggaggtcaacaaggtcctggatctcaaggtcctggtagtggtggccaacaaggaccaggtggacaaggcccatatggcccttccgccgctgctgctgcagcagcggccggaggatatggtccaggagcaggtcagcagggtccaggttctcaaggaccaggctctggcggtcagcagggacctggtggtcaaggaccttatggaccaggagcagctgccgcagccgctgctgtcggaggttacggacctggagcaggtcaacagggtccaggatcgcagggaccaggatccggtggacagcaaggtccaggcggacaaggaccttacggaccatcagctgccgctgccgcggccgctgctggaggttatggaccaggcgcaggtcaacaaggacctggtagccaaggccctggtagtggtggacaacagggtccaggtggtcaaggtccatatggtccatccgcagcggctgctgctgctgccgcaggtggttacggtcccggagctggacaacaaggacccggaggtgccggacagcaaggacctggttctcaaggacctggaggtcaaggaccatatggcccaggagccggacaacaaggtcctggtagccagggaccaggttcgggtggtcaacaaggtccgggaggtcaaggcccatacggtccatccgcagctgcagcagcagctgctgccggcggttatggtcctggtgccggccagcaaggaccaggttcacagggcccaggttctggaggtcaacaaggtcctggatctcaaggtcctggtagtggtggccaacaaggaccaggtggacaaggcccatatggcccttccgccgctgctgctgcagcagcggccggaggatatggtccaggagcaggtcagcagggtccaggttctcaaggaccaggctctggcggtcagcagggacctggtggtcaaggaccttatggaccaggagcagctgccgcagccgctgctgtcggaggttacggacctggagcaggtcaacagggtccaggatcgcagggaccaggatccggtggacagcaaggtccaggcggacaaggaccttacggaccatcagctgccgctgccgcggccgctgctggaggttatggaccaggcgcaggtcaacaaggacctggtagccaaggccctggtagtggtggacaacagggtccaggtggtcaaggtccatatggtccatccgcagcggctgctgctgctgccgcaggtggttacggtcccggagctggacaacaaggacccggaggtgccggacagcaaggacctggttctcaaggacctggaggtcaaggaccatatggcccaggagccggacaacaaggtcctggtagccagggaccaggttcgggtggtcaacaaggtccgggaggtcaaggcccatacggtccatccgcagctgcagcagcagctgctgccggcggttatggtcctggtgccggccagcaaggaccaggttcacagggcccaggttctggaggtcaacaaggtcctggatctcaaggtcctggtagtggtggccaacaaggaccaggtggacaaggcccatatggcccttccgccgctgctgctgcagcagcggccggaggatatggtccaggagcaggtcagcagggtccaggttctcaaggaccaggctctggcggtcagcagggacctggtggtcaaggaccttatggaccaggagcagctgccgcagccgctgctgtcggaggttacggacctggagcaggtcaacagggtccaggatcgcagggaccaggatccggtggacagcaaggtccaggcggacaaggaccttacggaccatcagctgccgctgccgcggccgctgctggaggttatggaccaggcgcaggtcaacaaggacctggtagccaaggccctggtagtggtggacaacagggtccaggtggtcaaggtccatatggtccatccgcagcggctgctgctgctgccgcaggtggttacggtcccggagctggacaacaaggacccggaggtgccggacagcaaggacctggttctcaaggacctggaggtcaaggaccatatggcccaggagccggacaacaaggtcctggtagccagggaccaggttcgggtggtcaacaaggtccgggaggtcaaggcccatacggtccatccgcagctgcagcagcagctgctgccggcggttatggtcctggtgccggccagcaaggaccaggttcacagggcccaggttctggaggtcaacaaggtcctggatctcaaggtcctggtagtggtggccaacaaggaccaggtggacaaggcccatatggcccttccgccgctgctgctgcagcagcggccggaggatatggtccaggagcaggtcagcagggtccaggttctcaaggaccaggctctggcggtcagcagggacctggtggtcaaggaccttatggaccaggagcagctgccgcagccgctgctgtcggaggttacggacctggagcaggtcaacagggtccaggatcgcagggaccaggatccggtggacagcaaggtccaggcggacaaggaccttacggaccatcagctgccgctgccgcggccgctgctggaggttatggaccaggcgcaggtcaacaaggacctggtagccaaggccctggtagtggtggacaacagggtccaggtggtcaaggtccatatggtccatccgcagcggctgctgctgctgccgcaggtgactacaaagatgacgacgataaagattacaaagacgatgacgataaggactataaagatgatgacgacaaataataa

SEQ ID NO: 1465 - DNA, 2508 bp, synthetic construct
  misc_feature 1..2508: note = Description of Artificial Sequence: Synthetic polynucleotide
  source 1..2508: mol_type = other DNA
atgagatttccttcaatttttactgctgttttattcgcagcatcctccgcattagctgctccagtcaacactacaacagaagatgaaacggcacaaattccggctgaagctgtcatcggttactcagatttagaaggggatttcgatgttgctgttttgccattttccaacagcacaaataacgggttattgtttataaatactactattgccagcattgctgctaaagaagaaggggtatctctcgagaaaagagaggctgaagcaggtaacgttggttaccaattgggtttcaacgttgctaacaccctgggtataggaaacgctcctggtcttggtaatgctctctcccaagctgtatcgtcggtcggagtaggagcttcatcaagtgcctatgcaaatgcagtctcaaatgctgtcggacaattcttggcaggtcagggcgttcttaatgcaggtaatgccggatcgttggccagcagcttcgctaacgctctttccgcttcggccgcttctgtggcatcctctgccgctgcacaaagtgcctttcaatcacaagcggccgctagtgcatttagtcgagctgcttctcagagtgcgagtcagtcagctgcaagaagtggtgctcagtcatcttctactactacaactacgtctacttcaggctctcaagctgcctctcagtccgcatcgtctgctgccgctcaagcatcagcgagtagctttgcgcaagcatcatccgcgtcacttgctgcctcaagtgcttttagtagtgccttctcttccgctaattcattgtccgccttaggtaacgttggttaccaattgggtttcaacgttgctaacaccctgggtataggaaacgctcctggtcttggtaatgctctctcccaagctgtatcgtcggtcggagtaggagcttcatcaagtgcctatgcaaatgcagtctcaaatgctgtcggacaattcttggcaggtcagggcgttcttaatgcaggtaatgccggatcgttggccagcagcttcgctaacgctctttccgcttcggccgcttctgtggcatcctctgccgctgcacaaagtgcctttcaatcacaagcggccgctagtgcatttagtcgagctgcttctcagagtgcgagtcagtcagctgcaagaagtggtgctcagtcatcttctactactacaactacgtctacttcaggctctcaagctgcctctcagtccgcatcgtctgctgccgctcaagcatcagcgagtagctttgcgcaagcatcatccgcgtcacttgctgcctcaagtgcttttagtagtgccttctcttccgctaattcattgtccgccttaggtaacgttggttaccaattgggtttcaacgttgctaacaccctgggtataggaaacgctcctggtcttggtaatgctctctcccaagctgtatcgtcggtcggagtaggagcttcatcaagtgcctatgcaaatgcagtctcaaatgctgtcggacaattcttggcaggtcagggcgttcttaatgcaggtaatgccggatcgttggccagcagcttcgctaacgctctttccgcttcggccgcttctgtggcatcctctgccgctgcacaaagtgcctttcaatcacaagcggccgctagtgcatttagtcgagctgcttctcagagtgcgagtcagtcagctgcaagaagtggtgctcagtcatcttctactactacaactacgtctacttcaggctctcaagctgcctctcagtccgcatcgtctgctgccgctcaagcatcagcgagtagctttgcgcaagcatcatccgcgtcacttgctgcctcaagtgcttttagtagtgccttctcttccgctaattcattgtccgccttaggtaacgttggttaccaattgggtttcaacgttgctaacaccctgggtataggaaacgctcctggtcttggtaatgctctctcccaagctgtatcgtcggtcggagtaggagcttcatcaagtgcctatgcaaatgcagtctcaaatgctgtcggacaattcttggcaggtcagggcgttcttaatgcaggtaatgccggatcgttggccagcagcttcgctaacgctctttccgcttcggccgcttctgtggcatcctctgccgctgcacaaagtgcctttcaatcacaagcggccgctagtgcatttagtcgagctgcttctcagagtgcgagtcagtcagctgcaagaagtggtgctcagtcatcttctactactacaactacgtctacttcaggctctcaagctgcctctcagtccgcatcgtctgctgccgctcaagcatcagcgagtagctttgcgcaagcatcatccgcgtcacttgctgcctcaagtgcttttagtagtgccttctcttccgctaattcattgtccgccttaggtgactacaaagatgacgacgataaagattacaaagacgatgacgataaggactataaagatgatgacgacaaataataa

SEQ ID NO: 1466 - DNA, 2640 bp, synthetic construct
  misc_feature 1..2640: note = Description of Artificial Sequence: Synthetic polynucleotide
  source 1..2640: mol_type = other DNA
atgagatttccttcaatttttactgctgttttattcgcagcatcctccgcattagctgctccagtcaacactacaacagaagatgaaacggcacaaattccggctgaagctgtcatcggttactcagatttagaaggggatttcgatgttgctgttttgccattttccaacagcacaaataacgggttattgtttataaatactactattgccagcattgctgctaaagaagaaggggtatctctcgagaaaagagaggctgaagcaggtccaggaggtgccggtggtccatatggaccgggaggaccaggtggcgcgggtcctggtggctacggtccaggaggatatggaccaggtggtgctggtccaggtggagcaggaccgggaggctatggaccaggtggagccggtcctggaggatatggtccaggaggtgcaggtcctggcggtagcggtcctggtggcataggtccaggtggatccggaccaggaggatacggtccaggtggaattggcccgggaggaactggccccggtggtgctggacctggtggtgcaggtccaggtggtgctggcccatccggtgctggtcctggtggcgctggtccatcaggtgccggaagaggtggttccggtaggggttcggttggccgaggtggcgccggcagaggtggagccggtagaggaggtgcaggaggagcaggcggatccggaggcgcaggtggctctggcggtgccggcggatctggaggaacaacaatcatcgaggaccttgatattaccgttgatggagctaatggtccaattactattagtgaagaactaactataggtggtgcaggtccaggaggtgccggtggtccatatggaccgggaggaccaggtggcgcgggtcctggtggctacggtccaggaggatatggaccaggtggtgctggtccaggtggagcaggaccgggaggctatggaccaggtggagccggtcctggaggatatggtccaggaggtgcaggtcctggcggtagcggtcctggtggcataggtccaggtggatccggaccaggaggatacggtccaggtggaattggcccgggaggaactggccccggtggtgctggacctggtggtgcaggtccaggtggtgctggcccatccggtgctggtcctggtggcgctggtccatcaggtgccggaagaggtggttccggtaggggttcggttggccgaggtggcgccggcagaggtggagccggtagaggaggtgcaggaggagcaggcggatccggaggcgcaggtggctctggcggtgccggcggatctggaggaacaacaatcatcgaggaccttgatattaccgttgatggagctaatggtccaattactattagtgaagaactaactataggtggtgcaggtccaggaggtgccggtggtccatatggaccgggaggaccaggtggcgcgggtcctggtggctacggtccaggaggatatggaccaggtggtgctggtccaggtggagcaggaccgggaggctatggaccaggtggagccggtcctggaggatatggtccaggaggtgcaggtcctggcggtagcggtcctggtggcataggtccaggtggatccggaccaggaggatacggtccaggtggaattggcccgggaggaactggccccggtggtgctggacctggtggtgcaggtccaggtggtgctggcccatccggtgctggtcctggtggcgctggtccatcaggtgccggaagaggtggttccggtaggggttcggttggccgaggtggcgccggcagaggtggagccggtagaggaggtgcaggaggagcaggcggatccggaggcgcaggtggctctggcggtgccggcggatctggaggaacaacaatcatcgaggaccttgatattaccgttgatggagctaatggtccaattactattagtgaagaactaactataggtggtgcaggtccaggaggtgccggtggtccatatggaccgggaggaccaggtggcgcgggtcctggtggctacggtccaggaggatatggaccaggtggtgctggtccaggtggagcaggaccgggaggctatggaccaggtggagccggtcctggaggatatggtccaggaggtgcaggtcctggcggtagcggtcctggtggcataggtccaggtggatccggaccaggaggatacggtccaggtggaattggcccgggaggaactggccccggtggtgctggacctggtggtgcaggtccaggtggtgctggcccatccggtgctggtcctggtggcgctggtccatcaggtgccggaagaggtggttccggtaggggttcggttggccgaggtggcgccggcagaggtggagccggtagaggaggtgcaggaggagcaggcggatccggaggcgcaggtggctctggcggtgccggcggatctggaggaacaacaatcatcgaggaccttgatattaccgttgatggagctaatggtccaattactattagtgaagaactaactataggtggtgcaggtgactacaaagatgacgacgataaagattacaaagacgatgacgataaggactataaagatgatgacgacaaataataa

SEQ ID NO: 1467 - DNA, 3240 bp, synthetic construct
  misc_feature 1..3240: note = Description of Artificial Sequence: Synthetic polynucleotide
  source 1..3240: mol_type = other DNA
atgagatttccttcaatttttactgctgttttattcgcagcatcctccgcattagctgctccagtcaacactacaacagaagatgaaacggcacaaattccggctgaagctgtcatcggttactcagatttagaaggggatttcgatgttgctgttttgccattttccaacagcacaaataacgggttattgtttataaatactactattgccagcattgctgctaaagaagaaggggtatctctcgagaaaagagaggctgaagcaggtgcaggagctggtcagggcggacgaggcggctacggtcaaggaggatttggaggacaaggctccggtgcaggtgctggtgcaagcgcagctgcaggtgcaggagctggccaaggtggaagaggaggttacggacagggtggtttcggtggtcaaggttccggtgccggagctggagcttccgctgcagctggagctggtgctggtcaaggaggtagaggaggctacggacaaggcggttttggcggacaaggttcaggtgccggtgctggcgctagcgccgcagctgctgccggtgcaggacaaggtggaagaggcggttacggtcaaggtggacttggtggttcaggatctggtgctggagccggtgctggtgctgctgccgccgcagctgctggcgcaggaggttatggacaaggtggattaggtggttacggccaaggcgccggcgctggacagggcggcctcggaggttacggatcaggagcaggagccggtgcctcagccgctgcggctgcaggtgccggaggtgctggacaaggaggtttgggtggttatggtcagggcgcaggtgccggtcaaggtggtctgggtggttatggcagcggtgctggtgcaggagcagcagccgctgccgcagccggagccggaggctctggtcaaggaggactcggtggttatggctctggaggtggagctggaggagcaagtgccgctgctgcaggtgcaggagctggtcagggcggacgaggcggctacggtcaaggaggatttggaggacaaggctccggtgcaggtgctggtgcaagcgcagctgcaggtgcaggagctggccaaggtggaagaggaggttacggacagggtggtttcggtggtcaaggttccggtgccggagctggagcttccgctgcagctggagctggtgctggtcaaggaggtagaggaggctacggacaaggcggttttggcggacaaggttcaggtgccggtgctggcgctagcgccgcagctgctgccggtgcaggacaaggtggaagaggcggttacggtcaaggtggacttggtggttcaggatctggtgctggagccggtgctggtgctgctgccgccgcagctgctggcgcaggaggttatggacaaggtggattaggtggttacggccaaggcgccggcgctggacagggcggcctcggaggttacggatcaggagcaggagccggtgcctcagccgctgcggctgcaggtgccggaggtgctggacaaggaggtttgggtggttatggtcagggcgcaggtgccggtcaaggtggtctgggtggttatggcagcggtgctggtgcaggagcagcagccgctgccgcagccggagccggaggctctggtcaaggaggactcggtggttatggctctggaggtggagctggaggagcaagtgccgctgctgcaggtgcaggagctggtcagggcggacgaggcggctacggtcaaggaggatttggaggacaaggctccggtgcaggtgctggtgcaagcgcagctgcaggtgcaggagctggccaaggtggaagaggaggttacggacagggtggtttcggtggtcaaggttccggtgccggagctggagcttccgctgcagctggagctggtgctggtcaaggaggtagaggaggctacggacaaggcggttttggcggacaaggttcaggtgccggtgctggcgctagcgccgcagctgctgccggtgcaggacaaggtggaagaggcggttacggtcaaggtggacttggtggttcaggatctggtgctggagccggtgctggtgctgctgccgccgcagctgctggcgcaggaggttatggacaaggtggattaggtggttacggccaaggcgccggcgctggacagggcggcctcggaggttacggatcaggagcaggagccggtgcctcagccgctgcggctgcaggtgccggaggtgctggacaaggaggtttgggtggttatggtcagggcgcaggtgccggtcaaggtggtctgggtggttatggcagcggtgctggtgcaggagcagcagccgctgccgcagccggagccggaggctctggtcaaggaggactcggtggttatggctctggaggtggagctggaggagcaagtgccgctgctgcaggtgcaggagctggtcagggcggacgaggcggctacggtcaaggaggatttggaggacaaggctccggtgcaggtgctggtgcaagcgcagctgcaggtgcaggagctggccaaggtggaagaggaggttacggacagggtggtttcggtggtcaaggttccggtgccggagctggagcttccgctgcagctggagctggtgctggtcaaggaggtagaggaggctacggacaaggcggttttggcggacaaggttcaggtgccggtgctggcgctagcgccgcagctgctgccggtgcaggacaaggtggaagaggcggttacggtcaaggtggacttggtggttcaggatctggtgctggagccggtgctggtgctgctgccgccgcagctgctggcgcaggaggttatggacaaggtggattaggtggttacggccaaggcgccggcgctggacagggcggcctcggaggttacggatcaggagcaggagccggtgcctcagccgctgcggctgcaggtgccggaggtgctggacaaggaggtttgggtggttatggtcagggcgcaggtgccggtcaaggtggtctgggtggttatggcagcggtgctggtgcaggagcagcagccgctgccgcagccggagccggaggctctggtcaaggaggactcggtggttatggctctggaggtggagctggaggagcaagtgccgctgctgcaggtgactacaaagatgacgacgataaagattacaaagacgatgacgataaggactataaagatgatgacgacaaataataa

SEQ ID NO: 1468 - DNA, 3276 bp, synthetic construct
  misc_feature 1..3276: note = Description of Artificial Sequence: Synthetic polynucleotide
  source 1..3276: mol_type = other DNA
atgagatttccttcaatttttactgctgttttattcgcagcatcctccgcattagctgctccagtcaacactacaacagaagatgaaacggcacaaattccggctgaagctgtcatcggttactcagatttagaaggggatttcgatgttgctgttttgccattttccaacagcacaaataacgggttattgtttataaatactactattgccagcattgctgctaaagaagaaggggtatctctcgagaaaagagaggctgaagcaggtcctggtggatacggtggaccaggccagcctggaccgggacaaggtcaatatggccctggtccaggccagcagggaccaagacagggtggtcaacagggtccagctagtgccgctgccgctgccgcagccggtccaggcggctacggtggtcctggacaacagggaccacggcagggtcaacagcaaggtcctgcatccgcagctgctgccgctgctgccgcagctgcgggtcccagaggttacggtggaccgggtcagcaaggaccagtacaaggaggacaacaaggacctgcctctgccgcagctgccgcagctgctgctggtgttggaggatatggtggtccgggtcaacaaggaccaggacaaggccaatacggtcctggaactggtcaacaaggacagggaccatccggacagcagggtcctgctggtgccgccgctgcagcagctggtggtgctgctggtccaggtggttatggaggtccaggacaacaaggtccaggtcaaggacaatatggtccaggaacaggtcaacagggccaaggcccaagtggtcaacaaggtccggcaggagcagccgcggctgccgctgctgctgccggtccgggaggttatggtggcccgggacaacagggtccaggacagggacagtatggtcctggtgcaggtcagcagggtcaaggtcctggttctcagcaaggtccagcatcagcggctgcagcagcagcaggtcctggtggatacggtggaccaggccagcctggaccgggacaaggtcaatatggccctggtccaggccagcagggaccaagacagggtggtcaacagggtccagctagtgccgctgccgctgccgcagccggtccaggcggctacggtggtcctggacaacagggaccacggcagggtcaacagcaaggtcctgcatccgcagctgctgccgctgctgccgcagctgcgggtcccagaggttacggtggaccgggtcagcaaggaccagtacaaggaggacaacaaggacctgcctctgccgcagctgccgcagctgctgctggtgttggaggatatggtggtccgggtcaacaaggaccaggacaaggccaatacggtcctggaactggtcaacaaggacagggaccatccggacagcagggtcctgctggtgccgccgctgcagcagctggtggtgctgctggtccaggtggttatggaggtccaggacaacaaggtccaggtcaaggacaatatggtccaggaacaggtcaacagggccaaggcccaagtggtcaacaaggtccggcaggagcagccgcggctgccgctgctgctgccggtccgggaggttatggtggcccgggacaacagggtccaggacagggacagtatggtcctggtgcaggtcagcagggtcaaggtcctggttctcagcaaggtccagcatcagcggctgcagcagcagcaggtcctggtggatacggtggaccaggccagcctggaccgggacaaggtcaatatggccctggtccaggccagcagggaccaagacagggtggtcaacagggtccagctagtgccgctgccgctgccgcagccggtccaggcggctacggtggtcctggacaacagggaccacggcagggtcaacagcaaggtcctgcatccgcagctgctgccgctgctgccgcagctgcgggtcccagaggttacggtggaccgggtcagcaaggaccagtacaaggaggacaacaaggacctgcctctgccgcagctgccgcagctgctgctggtgttggaggatatggtggtccgggtcaacaaggaccaggacaaggccaatacggtcctggaactggtcaacaaggacagggaccatccggacagcagggtcctgctggtgccgccgctgcagcagctggtggtgctgctggtccaggtggttatggaggtccaggacaacaaggtccaggtcaaggacaatatggtccaggaacaggtcaacagggccaaggcccaagtggtcaacaaggtccggcaggagcagccgcggctgccgctgctgctgccggtccgggaggttatggtggcccgggacaacagggtccaggacagggacagtatggtcctggtgcaggtcagcagggtcaaggtcctggttctcagcaaggtccagcatcagcggctgcagcagcagcaggtcctggtggatacggtggaccaggccagcctggaccgggacaaggtcaatatggccctggtccaggccagcagggaccaagacagggtggtcaacagggtccagctagtgccgctgccgctgccgcagccggtccaggcggctacggtggtcctggacaacagggaccacggcagggtcaacagcaaggtcctgcatccgcagctgctgccgctgctgccgcagctgcgggtcccagaggttacggtggaccgggtcagcaaggaccagtacaaggaggacaacaaggacctgcctctgccgcagctgccgcagctgctgctggtgttggaggatatggtggtccgggtcaacaaggaccaggacaaggccaatacggtcctggaactggtcaacaaggacagggaccatccggacagcagggtcctgctggtgccgccgctgcagcagctggtggtgctgctggtccaggtggttatggaggtccaggacaacaaggtccaggtcaaggacaatatggtccaggaacaggtcaacagggccaaggcccaagtggtcaacaaggtccggcaggagcagccgcggctgccgctgctgctgccggtccgggaggttatggtggcccgggacaacagggtccaggacagggacagtatggtcctggtgcaggtcagcagggtcaaggtcctggttctcagcaaggtccagcatcagcggctgcagcagcagcaggtgactacaaagatgacgacgataaagattacaaagacgatgacgataaggactataaagatgatgacgacaaataataa

SEQ ID NO: 1469 - DNA, 58 bp, synthetic construct
  misc_feature 1..58: note = Description of Artificial Sequence: Synthetic oligonucleotide
  source 1..58: mol_type = other DNA
cgcgccttagcgatggtctcaaggtggttacggtccaggcgctggtcaacaaggtcca

SEQ ID NO: 1470 - DNA, 50 bp, synthetic construct
  misc_feature 1..50: note = Description of Artificial Sequence: Synthetic oligonucleotide
  source 1..50: mol_type = other DNA
ggaagtggtggtcaacaaggacctggcggtcaaggaccctacggtagtgg

SEQ ID NO: 1471 - DNA, 50 bp, synthetic construct
  misc_feature 1..50: note = Description of Artificial Sequence: Synthetic oligonucleotide
  source 1..50: mol_type = other DNA
ccaacaaggtccaggtggagcaggacagcagggtccgggaggccaaggac

SEQ ID NO: 1472 - DNA, 53 bp, synthetic construct
  misc_feature 1..53: note = Description of Artificial Sequence: Synthetic oligonucleotide
  source 1..53: mol_type = other DNA
cttacggaccaggtgctgctgctgccgccgctgccgctgccggaggttacggt

SEQ ID NO: 1473 - DNA, 47 bp, synthetic construct
  misc_feature 1..47: note = Description of Artificial Sequence: Synthetic oligonucleotide
  source 1..47: mol_type = other DNA
ccaggagccggacaacagggtccaggtggagctggacaacaaggtcc

SEQ ID NO: 1474 - DNA, 50 bp, synthetic construct
  misc_feature 1..50: note = Description of Artificial Sequence: Synthetic oligonucleotide
  source 1..50: mol_type = other DNA
aggatcacaaggtcctggtggacaaggtccatacggtcctggtgctggtc

SEQ ID NO: 1475 - DNA, 51 bp, synthetic construct
  misc_feature 1..51: note = Description of Artificial Sequence: Synthetic oligonucleotide
  source 1..51: mol_type = other DNA
aacagggaccaggtagtcaaggacctggttcaggtggtcagcagggtccag

SEQ ID NO: 1476 - DNA, 48 bp, synthetic construct
  misc_feature 1..48: note = Description of Artificial Sequence: Synthetic oligonucleotide
  source 1..48: mol_type = other DNA
gaggacagggtccttacggcccttctgccgctgcagcagcagccgctg

SEQ ID NO: 1477 - DNA, 49 bp, synthetic construct
  misc_feature 1..49: note = Description of Artificial Sequence: Synthetic oligonucleotide
  source 1..49: mol_type = other DNA
ccgcaggaggatacggacctggtgctggacaacgatctcaaggaccagg

SEQ ID NO: 1478 - DNA, 49 bp, synthetic construct
  misc_feature 1..49: note = Description of Artificial Sequence: Synthetic oligonucleotide
  source 1..49: mol_type = other DNA
aggacaaggtccttatggacctggcgctggccaacaaggacctggttct

SEQ ID NO: 1479 - DNA, 49 bp, synthetic construct
  misc_feature 1..49: note = Description of Artificial Sequence: Synthetic oligonucleotide
  source 1..49: mol_type = other DNA
cagggtccaggttcaggaggccaacaaggcccaggaggtcaaggaccat

SEQ ID NO: 1480 - DNA, 60 bp, synthetic construct
  misc_feature 1..60: note = Description of Artificial Sequence: Synthetic oligonucleotide
  source 1..60: mol_type = other DNA
acggaccatccgctgcggcagctgcagctgctgcaggtacgtcttcatcgctatcctgca

SEQ ID NO: 1481 - DNA, 60 bp, synthetic construct
  misc_feature 1..60: note = Description of Artificial Sequence: Synthetic oligonucleotide
  source 1..60: mol_type = other DNA
acttcctggaccttgttgaccagcgcctggaccgtaaccaccttgagaccatcgctaagg

SEQ ID NO: 1482 - DNA, 50 bp, synthetic construct
  misc_feature 1..50: note = Description of Artificial Sequence: Synthetic oligonucleotide
  source 1..50: mol_type = other DNA
tgttggccactaccgtagggtccttgaccgccaggtccttgttgaccacc

SEQ ID NO: 1483 - DNA, 50 bp, synthetic construct
  misc_feature 1..50: note = Description of Artificial Sequence: Synthetic oligonucleotide
  source 1..50: mol_type = other DNA
cgtaaggtccttggcctcccggaccctgctgtcctgctccacctggacct

SEQ ID NO: 1484 - DNA, 53 bp, synthetic construct
  misc_feature 1..53: note = Description of Artificial Sequence: Synthetic oligonucleotide
  source 1..53: mol_type = other DNA
tcctggaccgtaacctccggcagcggcagcggcggcagcagcagcacctggtc

SEQ ID NO: 1485 - DNA, 47 bp, synthetic construct
  misc_feature 1..47: note = Description of Artificial Sequence: Synthetic oligonucleotide
  source 1..47: mol_type = other DNA
gatcctggaccttgttgtccagctccacctggaccctgttgtccggc

SEQ ID NO: 1486 - DNA, 50 bp, synthetic construct
  misc_feature 1..50: note = Description of Artificial Sequence: Synthetic oligonucleotide
  source 1..50: mol_type = other DNA
cctgttgaccagcaccaggaccgtatggaccttgtccaccaggaccttgt

SEQ ID NO: 1487 - DNA, 51 bp, synthetic construct
  misc_feature 1..51: note = Description of Artificial Sequence: Synthetic oligonucleotide
  source 1..51: mol_type = other DNA
gtcctcctggaccctgctgaccacctgaaccaggtccttgactacctggtc

SEQ ID NO: 1488 - DNA, 48 bp, synthetic construct
  misc_feature 1..48: note = Description of Artificial Sequence: Synthetic oligonucleotide
  source 1..48: mol_type = other DNA
ctgcggcagcggctgctgctgcagcggcagaagggccgtaaggaccct

SEQ ID NO: 1489 - DNA, 49 bp, synthetic construct
  misc_feature 1..49: note = Description of Artificial Sequence: Synthetic oligonucleotide
  source 1..49: mol_type = other DNA
tgtcctcctggtccttgagatcgttgtccagcaccaggtccgtatcctc

SEQ ID NO: 1490 - DNA, 49 bp, synthetic construct
  misc_feature 1..49: note = Description of Artificial Sequence: Synthetic oligonucleotide
  source 1..49: mol_type = other DNA
accctgagaaccaggtccttgttggccagcgccaggtccataaggacct

SEQ ID NO: 1491 - DNA, 49 bp, synthetic construct
  misc_feature 1..49: note = Description of Artificial Sequence: Synthetic oligonucleotide
  source 1..49: mol_type = other DNA
gtccgtatggtccttgacctcctgggccttgttggcctcctgaacctgg

SEQ ID NO: 1492 - DNA, 50 bp, synthetic construct
  misc_feature 1..50: note = Description of Artificial Sequence: Synthetic oligonucleotide
  source 1..50: mol_type = other DNA
ggatagcgatgaagacgtacctgcagcagctgcagctgccgcagcggatg

SEQ ID NO: 1493 - DNA, 58 bp, synthetic construct
  misc_feature 1..58: note = Description of Artificial Sequence: Synthetic oligonucleotide
  source 1..58: mol_type = other DNA
cgcgccttagcgatggtctcaaggtggatatggcccaggagccggacaacagggtcct

SEQ ID NO: 1494 - DNA, 52 bp, synthetic construct
  misc_feature 1..52: note = Description of Artificial Sequence: Synthetic oligonucleotide
  source 1..52: mol_type = other DNA
ggttcacaaggtccaggatctggtggtcaacagggaccaggcggccagggac

SEQ ID NO: 1495 - DNA, 51 bp, synthetic construct
  misc_feature 1..51: note = Description of Artificial Sequence: Synthetic oligonucleotide
  source 1..51: mol_type = other DNA
cttatggtccaggagccgctgcagcagcagcagctgttggaggttacggcc

SEQ ID NO: 1496 - DNA, 51 bp, synthetic construct
  misc_feature 1..51: note = Description of Artificial Sequence: Synthetic oligonucleotide
  source 1..51: mol_type = other DNA
ctggtgccggtcaacaaggcccaggatctcagggtcctggatctggaggac

SEQ ID NO: 1497 - DNA, 52 bp, synthetic construct
  misc_feature 1..52: note = Description of Artificial Sequence: Synthetic oligonucleotide
  source 1..52: mol_type = other DNA
aacaaggtcctggaggtcagggtccatacggaccttcagcagcagctgctgc

SEQ ID NO: 1498 - DNA, 50 bp, synthetic construct
  misc_feature 1..50: note = Description of Artificial Sequence: Synthetic oligonucleotide
  source 1..50: mol_type = other DNA
tgcagccgctggtggttatggacctggtgctggtcaacaaggaccgggtt

SEQ ID NO: 1499 - DNA, 51 bp, synthetic construct
  misc_feature 1..51: note = Description of Artificial Sequence: Synthetic oligonucleotide
  source 1..51: mol_type = other DNA
ctcagggtccgggttcaggaggtcagcagggccctggtggacaaggacctt

SEQ ID NO: 1500 - DNA, 60 bp, synthetic construct
  misc_feature 1..60: note = Description of Artificial Sequence: Synthetic oligonucleotide
  source 1..60: mol_type = other DNA
atggacctagtgcggctgcagcagctgccgccgcaggtacgtcttcatcgctatcctgca

SEQ ID NO: 1501 - DNA, 60 bp, synthetic construct
  misc_feature 1..60: note = Description of Artificial Sequence: Synthetic oligonucleotide
  source 1..60: mol_type = other DNA
tgaaccaggaccctgttgtccggctcctgggccatatccaccttgagaccatcgctaagg

SEQ ID NO: 1502 - DNA, 52 bp, synthetic construct
  misc_feature 1..52: note = Description of Artificial Sequence: Synthetic oligonucleotide
  source 1..52: mol_type = other DNA
cataaggtccctggccgcctggtccctgttgaccaccagatcctggaccttg

SEQ ID NO: 1503 - DNA, 51 bp, synthetic construct
  misc_feature 1..51: note = Description of Artificial Sequence: Synthetic oligonucleotide
  source 1..51: mol_type = other DNA
caccagggccgtaacctccaacagctgctgctgctgcagcggctcctggac

SEQ ID NO: 1504 - DNA, 51 bp, synthetic construct
  misc_feature 1..51: note = Description of Artificial Sequence: Synthetic oligonucleotide
  source 1..51: mol_type = other DNA
cttgttgtcctccagatccaggaccctgagatcctgggccttgttgaccgg

SEQ ID NO: 1505 - DNA, 52 bp, synthetic construct
  misc_feature 1..52: note = Description of Artificial Sequence: Synthetic oligonucleotide
  source 1..52: mol_type = other DNA
gctgcagcagcagctgctgctgaaggtccgtatggaccctgacctccaggac

SEQ ID NO: 1506 - DNA, 50 bp, synthetic construct
  misc_feature 1..50: note = Description of Artificial Sequence: Synthetic oligonucleotide
  source 1..50: mol_type = other DNA
cctgagaacccggtccttgttgaccagcaccaggtccataaccaccagcg

SEQ ID NO: 1507 - DNA, 51 bp, synthetic construct
  misc_feature 1..51: note = Description of Artificial Sequence: Synthetic oligonucleotide
  source 1..51: mol_type = other DNA
gtccataaggtccttgtccaccagggccctgctgacctcctgaacccggac

SEQ ID NO: 1508 - DNA, 50 bp, synthetic construct
  misc_feature 1..50: note = Description of Artificial Sequence: Synthetic oligonucleotide
  source 1..50: mol_type = other DNA
ggatagcgatgaagacgtacctgcggcggcagctgctgcagccgcactag

SEQ ID NO: 1509 - protein, 892 aa, synthetic construct
  REGION 1..892: note = Description of Artificial Sequence: Synthetic polypeptide
MRFPSIFTAVLFAASSALAAPVNTTTEDETAQIPAEAVIGYSDLEGDFDVAVLPFSNSTNNGLLFINTTIASIAAKEEGVSLEKREAEAGAGYTGPSGPSTGPSGYPGPLGGGAPFGQSGFGGSDGPQGGFGATGGASAGLISRVANALANTSTLRTVLRTGVSQQIASSVVQRAAQSLASTLGVDGNNLARFAVQAVSRLPAGSDTSAYAQAFSSALFNAGVLNASNIDTLGSRVLSALLNGVSSAAQGLGINVDSGSVQSDISSSSSFLSTSSSSASYSQASASSTSGAGYTGPSGPSTGPSGYPGPLGGGAPFGQSGFGGSDGPQGGFGATGGASAGLISRVANALANTSTLRTVLRTGVSQQIASSVVQRAAQSLASTLGVDGNNLARFAVQAVSRLPAGSDTSAYAQAFSSALFNAGVLNASNIDTLGSRVLSALLNGVSSAAQGLGINVDSGSVQSDISSSSSFLSTSSSSASYSQASASSTSGFTGASYPGPQVSQPAPFGVGPQPGGALPGFGQVSGAQSALISRIANALGNTATMRAVLRSGVSQQIVSNVVQGAVQALSSSLGIDGNNLARIASQTILRVPAGSDTSAYAQAFSTALFNSGVLNASNVNTLGSQVVSTLLRGISSTAQGLGLNVDAGSVQSDISSSSSFLSTSSSSTSSSQTTAASTSGFTGASYPGPQVSQPAPFGVGPQPGGALPGFGQVSGAQSALISRIANALGNTATMRAVLRSGVSQQIVSNVVQGAVQALSSSLGIDGNNLARIASQTILRVPAGSDTSAYAQAFSTALFNSGVLNASNVNTLGSQVVSTLLRGISSTAQGLGLNVDAGSVQSDISSSSSFLSTSSSSTSSSQTTAASTSGDYKDDDDKDYKDDDDKDYKDDDDK

SEQ ID NO: 1510 - DNA, 2976 bp, synthetic construct
  misc_feature 1..2976: note = Description of Artificial Sequence: Synthetic polynucleotide
  source 1..2976: mol_type = other DNA
gaaacgatgagatttccttcaatttttactgctgttttattcgcagcatcctccgcattagctgctccagtcaacactacaacagaagatgaaacggcacaaattccggctgaagctgtcatcggttactcagatttagaaggggatttcgatgttgctgttttgccattttccaacagcacaaataacgggttattgtttataaatactactattgccagcattgctgctaaagaagaaggggtatctctcgagaaaagagaggctgaagcaggtgctggagccggcgctggagctggcgccggagcaggctattcggccggcgctggttacggtattggagctggagccggagtgggcgctggtgctggtgcaggcgcaggtgccggatctggtaccggtactggagccggatatggttacggatcttcaacccaatctagctccaccatttacgctgctacctaccagggtggttatggacgagttgcaggcctgggtgccggagctggtgcaggtgcaggtgcaggaggaggtgcaggtgccggagcaggtacaggtgccggagctggagcaggaataggtgctggttatggtgctggcgcgggttatggagccggagctggaaccggctccggagcaggtgccggtgcaggaggaggcgcagcagctggtgctggttcgggtgttggtgcaggctacggtgcaggagctggctatggagccggagccggagccggtggtggagcaggtgcaggagccggaagcggtgcttcagcaggtgctggagccggcgctggagctggcgccggagcaggctattcggccggcgctggttacggtattggagctggagccggagtgggcgctggtgctggtgcaggcgcaggtgccggatctggtaccggtactggagccggatatggttacggatcttcaacccaatctagctccaccatttacgctgctacctaccagggtggttatggacgagttgcaggcctgggtgccggagctggtgcaggtgcaggtgcaggaggaggtgcaggtgccggagcaggtacaggtgccggagctggagcaggaataggtgctggttatggtgctggcgcgggttatggagccggagctggaaccggctccggagcaggtgccggtgcaggaggaggcgcagcagctggtgctggttcgggtgttggtgcaggctacggtgcaggagctggctatggagccggagccggagccggtggtggagcaggtgcaggagccggaagcggtgcttcagcaggtggcgcaccaggtggtggaccaggaggtgccggtccgggcggtgccggatttggacccggaggaggagccggattcggccctggaggaggtgccggtttcggcccaggaggtgctgccggaggaccaggtggtcctggtggacctggaggtccaggtggagctggtggatacggtccaggaggagctggaggatacggaccaggaggtgtcggtcctggtggagctggaggatatggacctggaggtgctggaggttacggtccaggaggttccggtccaggtggtgccggaccgggtggtgccggtggcgagggtccggttactgtagacgttgatgttactgttggacctgaaggagtgggaggaggaccaggtggcgccggtccaggaggtgcaggattcggcccaggtggcggagcgggtttcggtccaggtggcgcccctggagccccaggaggaccaggaggtcctggaggaccgggtggtccaggaggtccaggaggtgtaggaccgggtggagctggaggttacggccctggtggtgctggtggagtaggaccggctggtactggaggattcggtcctggaggagccggtggttttggacctggtggagcaggaggttttggtcctggaggagcaggtggattcggaccaggaggtgctggaggatatggtccaggtggtgttggtcctggtggtgcaggaggttttggacctggaggagttggtccaggaggatcaggacccggaggagctggtggtgaaggaccagtaacagtagatgtagacgtctcagtaggtggcgcaccaggtggtggaccaggaggtgccggtccgggcggtgccggatttggacccggaggaggagccggattcggccctggaggaggtgccggtttcggcccaggaggtgctgccggaggaccaggtggtcctggtggacctggaggtccaggtggagctggtggatacggtccaggaggagctggaggatacggaccaggaggtgtcggtcctggtggagctggaggatatggacctggaggtgctggaggttacggtccaggaggttccggtccaggtggtgccggaccgggtggtgccggtggcgagggtccggttactgtagacgttgatgttactgttggacctgaaggagtgggaggaggaccaggtggcgccggtccaggaggtgcaggattcggcccaggtggcggagcgggtttcggtccaggtggcgcccctggagccccaggaggaccaggaggtcctggaggaccgggtggtccaggaggtccaggaggtgtaggaccgggtggagctggaggttacggccctggtggtgctggtggagtaggaccggctggtactggaggattcggtcctggaggagccggtggttttggacctggtggagcaggaggttttggtcctggaggagcaggtggattcggaccaggaggtgctggaggatatggtccaggtggtgttggtcctggtggtgcaggaggttttggacctggaggagttggtccaggaggatcaggacccggaggagctggtggtgaaggaccagtaacagtagatgtagacgtctcagtaggtgactacaaagatgacgacgataaagattacaaagacgatgacgataaggactataaagatgatgacgacaaataataa

SEQ ID NO: 1511 - protein, 988 aa, synthetic construct
  REGION 1..988: note = Description of Artificial Sequence: Synthetic polypeptide
MRFPSIFTAVLFAASSALAAPVNTTTEDETAQIPAEAVIGYSDLEGDFDVAVLPFSNSTNNGLLFINTTIASIAAKEEGVSLEKREAEAGAGAGAGAGAGAGYSAGAGYGIGAGAGVGAGAGAGAGAGSGTGTGAGYGYGSSTQSSSTIYAATYQGGYGRVAGLGAGAGAGAGAGGGAGAGAGTGAGAGAGIGAGYGAGAGYGAGAGTGSGAGAGAGGGAAAGAGSGVGAGYGAGAGYGAGAGAGGGAGAGAGSGASAGAGAGAGAGAGAGYSAGAGYGIGAGAGVGAGAGAGAGAGSGTGTGAGYGYGSSTQSSSTIYAATYQGGYGRVAGLGAGAGAGAGAGGGAGAGAGTGAGAGAGIGAGYGAGAGYGAGAGTGSGAGAGAGGGAAAGAGSGVGAGYGAGAGYGAGAGAGGGAGAGAGSGASAGGAPGGGPGGAGPGGAGFGPGGGAGFGPGGGAGFGPGGAAGGPGGPGGPGGPGGAGGYGPGGAGGYGPGGVGPGGAGGYGPGGAGGYGPGGSGPGGAGPGGAGGEGPVTVDVDVTVGPEGVGGGPGGAGPGGAGFGPGGGAGFGPGGAPGAPGGPGGPGGPGGPGGPGGVGPGGAGGYGPGGAGGVGPAGTGGFGPGGAGGFGPGGAGGFGPGGAGGFGPGGAGGYGPGGVGPGGAGGFGPGGVGPGGSGPGGAGGEGPVTVDVDVSVGGAPGGGPGGAGPGGAGFGPGGGAGFGPGGGAGFGPGGAAGGPGGPGGPGGPGGAGGYGPGGAGGYGPGGVGPGGAGGYGPGGAGGYGPGGSGPGGAGPGGAGGEGPVTVDVDVTVGPEGVGGGPGGAGPGGAGFGPGGGAGFGPGGAPGAPGGPGGPGGPGGPGGPGGVGPGGAGGYGPGGAGGVGPAGTGGFGPGGAGGFGPGGAGGFGPGGAGGFGPGGAGGYGPGGVGPGGAGGFGPGGVGPGGSGPGGAGGEGPVTVDVDVSVGDYKDDDDKDYKDDDDKDYKDDDDK

SEQ ID NO: 1512 - DNA, 5938 bp, synthetic construct
  misc_feature 1..5938: note = Description of Artificial Sequence: Synthetic polynucleotide
  source 1..5938: mol_type = other DNA
actagtgttcttttctgtatgaaaatagttatttcgagtctctacggaaatagcgagagatgatatacctaaatagagataaaatcatctcaaaaaaatgggtctactaaaatattattccatctattacaataaattcacagaatagtcttttaagtaagtctactctgaacttaagcaaaaggagagggacgcgtgtgagaagcaaaaaattgtggatcagcttgttgtttgcgttaacgttaatctttacgatggcgttcagcaacatgtctgcgcaggctgcggccggtgcacatatggagctcggtaccctcgagggatccgaattcaagcttgtcgacctgcagtctagacatcaccatcatcaccactaatgcggtagtttatcacagttaaattgctaacgcagtcaggcaccgtgtatgaaatctaacaatgcgctcatcgtcatcctcggcaccgtcaccctggatgctgtaggcataggcttggttatgccggtactgccgggcctatttcactttttgcattctacaaactgcataactattatgtaaatcgctcctttttaggtggcacaaatgtgaggcattttcgctctttccggcaaccacttccaagtaaagtataacacactatactttatattcataaagtgtgtgctctgcgaggctgtcggcagtgccgaccaaaaccataaaacctttaagacctttcttttttttacgagaaaaaagaaacaaaaaaacctgccctctgccacctcagcaaaggggggttttgctctcgtgctcgtttaaaaatcagcaagggacaggtagtattttttgagaagatcactcaaaaaatctccacctttaaacccttgccaatttttattttgtccgttttgtctagcttaccgaaagccagactcagcaagaataaaatttttattgtctttcggttttctagtgtaacggacaaaaccactcaaaataaaaaagatacaagagaggtctctcgtatcttttattcagcaatcgcgcccgattgctgaacagattaataatagattttagctttttatttgttgaaaaaagctaatcaaattgttgtcgggatcaattactgcaaagtctcgttcatcccaccactgatcttttaatgatgtattggggtgcaaaatgcccaaaggcttaatatgttgatataattcatcaattccctctacttcaatgcggcaactagcagtaccagcaataaacgactccgcacctgtacaaaccggtgaatcattactacgagagcgccagccttcatcacttgcctcccatagatgaatccgaacctcattacacattagaactgcgaatccatcttcatggtgaaccaaagtgaaacctagtttatcgcaataaaaacctatactctttttaatatccccgactggcaatgccgggatagactgtaacattctcacgcataaaatcccctttcattttctaatgtaaatctattaccttattattaattcaattcgctcataattaatcctttttcttattacgcaaaatggcccgatttaagcacaccctttattccgttaatgcgccatgacagccatgataattactaatactaggagaagttaataaatacgagcaaaaggccagcaaaaggccaggaaccgtaaaaaggccgcgttgctggcgtttttccataggctccgcccccctgacgagcatcacaaaaatcgacgctcaagtcagaggtggcgaaacccgacaggactataaagataccaggcgtttccccctggaagctccctcgtgcgctctcctgttccgaccctgccgcttaccggatacctgtccgcctttctcccttcgggaagcgtggcgctttctcatagctcacgctgtaggtatctcagttcggtgtaggtcgttcgctccaagctgggctgtgtgcacgaaccccccgttcagcccgaccgctgcgccttatccggtaactatcgtcttgagtccaacccggtaagacacgacttatcgccactggcagcagccactggtaacaggattagcagagcgaggtatgtaggcggtgctacagagttcttgaagtggtggcctaactacggctacactagaagaacagtatttggtatctgcgctctgctgaagccagttaccttcggaaaaagagttggtagctcttgatccggcaaacaaaccaccgctggtagcggtggtttttttgtttgcaagcagcagattacgcgcagaaaaaaaggatctcaagaagatcctttgatcttttctacggggtctgacgctcagtggaacgaaaactcacgttaagggattttggtcatgagattatcaaaaaggatcttcacctagatccttttaaattaaaaatgaagttttaaatcaatctaaagtatatatgagtaaacttggtctgacagttaccaatgcttaatcagtgaggcacctatctcagcgatctgtctatttcgttcatccatagttgcctgactccccgtcgtgtagataactacgatacgggagggcttaccatctggccccagtgctgcaatgataccgcgagacccacgctcaccggctccagatttatcagcaataaaccagccagccggaagggccgagcgcagaagtggtcctgcaactttatccgcctccatccagtctattaattgttgccgggaagctagagtaagtagttcgccagttaatagtttgcgcaacgttgttgccattgctacaggcatcgtggtgtcacgctcgtcgtttggtatggcttcattcagctccggttcccaacgatcaaggcgagttacatgatcccccatgttgtgcaaaaaagcggttagctccttcggtcctccgatcgttgtcagaagtaagttggccgcagtgttatcactcatggttatggcagcactgcataattctcttactgtcatgccatccgtaagatgcttttctgtgactggtgagtactcaaccaagtcattctgagaatagtgtatgcggcgaccgagttgctcttgcccggcgtcaatacgggataataccgcgccacatagcagaactttaaaagtgctcatcattggaaaacgttcttcggggcgaaaactctcaaggatcttaccgctgttgagatccagttcgatgtaacccactcgtgcacccaactgatcttcagcatcttttactttcaccagcgtttctgggtgagcaaaaacaggaaggcaaaatgccgcaaaaaagggaataagggcgacacggaaatgttgaatactcatactcttcctttttcaatattattgaagcatttatcagggttattgtctcatgagcggatacatatttgaatgtatttagaaaaataaacaaataggggttccgcgcacatttccccgaaaagtgccacctgacgtctaagaaaccattattatcatgacattaacctataaaaataggcgtatcacgaggccctttcgtctcgcgcgtttcggtgatgacggtgaaaacctctgacagtaaccaacatgattaacaattattagaggtcatcgttcaaaatggtatgcgttttgacacatccactatatatccgtgtcgttctgtccactcctgaatcccattccagaaattctctagcgattccagaagtttctcagagtcggaaagttgaccagacattacgaactggcacagatggtcataacctgaaggaagatctgattgcttaactgcttcagttaagaccgaagcgctcgtcgtataacagatgcgatgatgcagaccaatcaacatggcacctgccattgctacctgtacagtcaaggatggtagaaatgttgtcggtccttgcacacgaatattacgccatttgcctgcatattcaaacagctcttctacgataagggcacaaatcgcatcgtggaacgtttgggcttctaccgatttagcagtttgatacactttctctaagtatccacctgaatcataaatcggcaaaatagagaaaaattgaccatgtgtaagcggccaatctgattccacctgagatgcataatctagtagaatctcttcgctatcaaaattcacttccaccttccactcaccggttgtccattcatggctgaactctgcttcctctgttgacatgacacacatcatctcaatatccgaatagggcccatcagtctgacgaccaagagagccataaacaccaatagccttaacatcatccccatatttatccaatattcgttccttaatttcatgaacaatcttcattctttcttctctagtcattattattggtccattcactattctcattcccttttcagataattttagatttgcttttctaaataagaatatttggagagcaccgttcttattcagctattaataactcgtcttcctaagcatccttcaatccttttaataacaattatagcatctaatcttcaacaaactggcccgtttgttgaactactctttaataaaataatttttccgttcccaattccacattgcaataatagaaaatccatcttcatcggctttttcgtcatcatctgtatgaatcaaatcgccttcttctgtgtcatcaaggtttaattttttatgtatttcttttaacaaaccaccataggagattaaccttttacggtgtaaaccttcctccaaatcagacaaacgtttcaaattcttttcttcatcatcggtcataaaatccgtatcctttacaggatattttgcagtttcgtcaattgccgattgtatatccgatttatatttatttttcggtcgaatcatttgaacttttacatttggatcatagtctaatttcattgcctttttccaaaattgaatccattgtttttgattcacgtagttttctgtattcttaaaataagttggttccacacataccaatacatgcatgtgctgattataagaattatctttattatttattgtcacttccgttgcacgcataaaaccaacaagatttttattaatttttttatattgcatcattcggcgaaatccttgagccatatctgacaaactcttatttaattcttcgccatcataaacatttttaactgttaatgtgagaaacaaccaacgaactgttggcttttgtttaataacttcagcaacaaccttttgtgactgaatgccatgtttcattgctctcctccagttgcacattggacaaagcctggatttacaaaaccacactcgatacaactttctttcgcctgtttcacgattttgtttatactctaatatttcagcacaatcttttactctttcagcctttttaaattcaagaatatgcagaagttcaaagtaatcaacattagcgattttcttttctctccatggtctcacttttccactttttgtcttgtccactaaaacccttgatttttcatctgaataaatgctactattaggacacataatattaaaagaaacccccatctatttagttatttgtttagtcacttataactttaacagatggggtttttctgtgcaaccaattttaagggttttcaatactttaaaacacatacataccaacacttcaacgcacctttcagcaactaaaataaaaatgacgttatttctatatgtatcaagataagaaagaacaagttcaaaaccatcaaaaaaagacaccttttcaggtgctttttttattttataaactcattccctgatctcgacttcgttctttttttacctctcggttatgagttagttcaaattcgttctttttaggttctaaatcgtgtttttcttggaattgtgctgttttatcctttaccttgtctacaaaccccttaaaaacgtttttaaaggcttttaagccgtctgtacgttcctaa

SEQ ID NO: 1513 - DNA, 8759 bp, synthetic construct
  misc_feature 1..8759: note = Description of Artificial Sequence: Synthetic polynucleotide
  source 1..8759: mol_type = other DNA
actagtgttcttttctgtatgaaaatagttatttcgagtctctacggaaatagcgagagatgatatacctaaatagagataaaatcatctcaaaaaaatgggtctactaaaatattattccatctattacaataaattcacagaatagtcttttaagtaagtctactctgaacttaagcaaaaggagagggacgcgtgtgagaagcaaaaaattgtggatcagcttgttgtttgcgttaacgttaatctttacgatggcgttcagcaacatgtctgcgcaggctgcggccgggttacggtccaggcgctggtcaacaaggtccaggaagtggtggtcaacaaggacctggcggtcaaggaccctacggtagtggccaacaaggtccaggtggagcaggacagcagggtccgggaggccaaggaccttacggaccaggtgctgctgctgccgccgctgccgctgccggaggttacggtccaggagccggacaacagggtccaggtggagctggacaacaaggtccaggatcacaaggtcctggtggacaaggtccatacggtcctggtgctggtcaacagggaccaggtagtcaaggacctggttcaggtggtcagcagggtccaggaggacagggtccttacggcccttctgccgctgcagcagcagccgctgccgcaggaggatacggacctggtgctggacaacgatctcaaggaccaggaggacaaggtccttatggacctggcgctggccaacaaggacctggttctcagggtccaggttcaggaggccaacaaggcccaggaggtcaaggaccatacggaccatccgctgcggcagctgcagctgctgcaggtggatatggcccaggagccggacaacagggtcctggttcacaaggtccaggatctggtggtcaacagggaccaggcggccagggaccttatggtccaggagccgctgcagcagcagcagctgttggaggttacggccctggtgccggtcaacaaggcccaggatctcagggtcctggatctggaggacaacaaggtcctggaggtcagggtccatacggaccttcagcagcagctgctgctgcagccgctggtggttatggacctggtgctggtcaacaaggaccgggttctcagggtccgggttcaggaggtcagcagggccctggtggacaaggaccttatggacctagtgcggctgcagcagctgccgccgcaggtggttacggtccaggcgctggtcaacaaggtccaggaagtggtggtcaacaaggacctggcggtcaaggaccctacggtagtggccaacaaggtccaggtggagcaggacagcagggtccgggaggccaaggaccttacggaccaggtgctgctgctgccgccgctgccgctgccggaggttacggtccaggagccggacaacagggtccaggtggagctggacaacaaggtccaggatcacaaggtcctggtggacaaggtccatacggtcctggtgctggtcaacagggaccaggtagtcaaggacctggttcaggtggtcagcagggtccaggaggacagggtccttacggcccttctgccgctgcagcagcagccgctgccgcaggaggatacggacctggtgctggacaacgatctcaaggaccaggaggacaaggtccttatggacctggcgctggccaacaaggacctggttctcagggtccaggttcaggaggccaacaaggcccaggaggtcaaggaccatacggaccatccgctgcggcagctgcagctgctgcaggtggatatggcccaggagccggacaacagggtcctggttcacaaggtccaggatctggtggtcaacagggaccaggcggccagggaccttatggtccaggagccgctgcagcagcagcagctgttggaggttacggccctggtgccggtcaacaaggcccaggatctcagggtcctggatctggaggacaacaaggtcctggaggtcagggtccatacggaccttcagcagcagctgctgctgcagccgctggtggttatggacctggtgctggtcaacaaggaccgggttctcagggtccgggttcaggaggtcagcagggccctggtggacaaggaccttatggacctagtgcggctgcagcagctgccgccgcaggtggttacggtccaggcgctggtcaacaaggtccaggaagtggtggtcaacaaggacctggcggtcaaggaccctacggtagtggccaacaaggtccaggtggagcaggacagcagggtccgggaggccaaggaccttacggaccaggtgctgctgctgccgccgctgccgctgccggaggttacggtccaggagccggacaacagggtccaggtggagctggacaacaaggtccaggatcacaaggtcctggtggacaaggtccatacggtcctggtgctggtcaacagggaccaggtagtcaaggacctggttcaggtggtcagcagggtccaggaggacagggtccttacggcccttctgccgctgcagcagcagccgctgccgcaggaggatacggacctggtgctggacaacgatctcaaggaccaggaggacaaggtccttatggacctggcgctggccaacaaggacctggttctcagggtccaggttcaggaggccaacaaggcccaggaggtcaaggaccatacggaccatccgctgcggcagctgcagctgctgcaggtggatatggcccaggagccggacaacagggtcctggttcacaaggtccaggatctggtggtcaacagggaccaggcggccagggaccttatggtccaggagccgctgcagcagcagcagctgttggaggttacggccctggtgccggtcaacaaggcccaggatctcagggtcctggatctggaggacaacaaggtcctggaggtcagggtccatacggaccttcagcagcagctgctgctgcagccgctggtggttatggacctggtgctggtcaacaaggaccgggttctcagggtccgggttcaggaggtcagcagggccctggtggacaaggaccttatggacctagtgcggctgcagcagctgccgccgcagactacaaagatgacgacgataaagattacaaagacgatgacgataaggactataaagatgatgacgacaaataatgcggtagtttatcacagttaaattgctaacgcagtcaggcaccgtgtatgaaatctaacaatgcgctcatcgtcatcctcggcaccgtcaccctggatgctgtaggcataggcttggttatgccggtactgccgggcctatttcactttttgcattctacaaactgcataactattatgtaaatcgctcctttttaggtggcacaaatgtgaggcattttcgctctttccggcaaccacttccaagtaaagtataacacactatactttatattcataaagtgtgtgctctgcgaggctgtcggcagtgccgaccaaaaccataaaacctttaagacctttcttttttttacgagaaaaaagaaacaaaaaaacctgccctctgccacctcagcaaaggggggttttgctctcgtgctcgtttaaaaatcagcaagggacaggtagtattttttgagaagatcactcaaaaaatctccacctttaaacccttgccaatttttattttgtccgttttgtctagcttaccgaaagccagactcagcaagaataaaatttttattgtctttcggttttctagtgtaacggacaaaaccactcaaaataaaaaagatacaagagaggtctctcgtatcttttattcagcaatcgcgcccgattgctgaacagattaataatagattttagctttttatttgttgaaaaaagctaatcaaattgttgtcgggatcaattactgcaaagtctcgttcatcccaccactgatcttttaatgatgtattggggtgcaaaatgcccaaaggcttaatatgttgatataattcatcaattccctctacttcaatgcggcaactagcagtaccagcaataaacgactccgcacctgtacaaaccggtgaatcattactacgagagcgccagccttcatcacttgcctcccatagatgaatccgaacctcattacacattagaactgcgaatccatcttcatggtgaaccaaagtgaaacctagtttatcgcaataaaaacctatactctttttaatatccccgactggcaatgccgggatagactgtaacattctcacgcataaaatcccctttcattttctaatgtaaatctattaccttattattaattcaattcgctcataattaatcctttttcttattacgcaaaatggcccgatttaagcacaccctttattccgttaatgcgccatgacagccatgataattactaatactaggagaagttaataaatacgagcaaaaggccagcaaaaggccaggaaccgtaaaaaggccgcgttgctggcgtttttccataggctccgcccccctgacgagcatcacaaaaatcgacgctcaagtcagaggtggcgaaacccgacaggactataaagataccaggcgtttccccctggaagctccctcgtgcgctctcctgttccgaccctgccgcttaccggatacctgtccgcctttctcccttcgggaagcgtggcgctttctcatagctcacgctgtaggtatctcagttcggtgtaggtcgttcgctccaagctgggctgtgtgcacgaaccccccgttcagcccgaccgctgcgccttatccggtaactatcgtcttgagtccaacccggtaagacacgacttatcgccactggcagcagccactggtaacaggattagcagagcgaggtatgtaggcggtgctacagagttcttgaagtggtggcctaactacggctacactagaagaacagtatttggtatctgcgctctgctgaagccagttaccttcggaaaaagagttggtagctcttgatccggcaaacaaaccaccgctggtagcggtggtttttttgtttgcaagcagcagattacgcgcagaaaaaaaggatctcaagaagatcctttgatcttttctacggggtctgacgctcagtggaacgaaaactcacgttaagggattttggtcatgagattatcaaaaaggatcttcacctagatccttttaaattaaaaatgaagttttaaatcaatctaaagtatatatgagtaaacttggtctgacagttaccaatgcttaatcagtgaggcacctatctcagcgatctgtctatttcgttcatccatagttgcctgactccccgtcgtgtagataactacgatacgggagggcttaccatctggccccagtgctgcaatgataccgcgagacccacgctcaccggctccagatttatcagcaataaaccagccagccggaagggccgagcgcagaagtggtcctgcaactttatccgcctccatccagtctattaattgttgccgggaagctagagtaagtagttcgccagttaatagtttgcgcaacgttgttgccattgctacaggcatcgtggtgtcacgctcgtcgtttggtatggcttcattcagctccggttcccaacgatcaaggcgagttacatgatcccccatgttgtgcaaaaaagcggttagctccttcggtcctccgatcgttgtcagaagtaagttggccgcagtgttatcactcatggttatggcagcactgcataattctcttactgtcatgccatccgtaagatgcttttctgtgactggtgagtactcaaccaagtcattctgagaatagtgtatgcggcgaccgagttgctcttgcccggcgtcaatacgggataataccgcgccacatagcagaactttaaaagtgctcatcattggaaaacgttcttcggggcgaaaactctcaaggatcttaccgctgttgagatccagttcgatgtaacccactcgtgcacccaactgatcttcagcatcttttactttcaccagcgtttctgggtgagcaaaaacaggaaggcaaaatgccgcaaaaaagggaataagggcgacacggaaatgttgaatactcatactcttcctttttcaatattattgaagcatttatcagggttattgtctcatgagcggatacatatttgaatgtatttagaaaaataaacaaataggggttccgcgcacatttccccgaaaagtgccacctgacgtctaagaaaccattattatcatgacattaacctataaaaataggcgtatcacgaggccctttcgtctcgcgcgtttcggtgatgacggtgaaaacctctgacagtaaccaacatgattaacaattattagaggtcatcgttcaaaatggtatgcgttttgacacatccactatatatccgtgtcgttctgtccactcctgaatcccattccagaaattctctagcgattccagaagtttctcagagtcggaaagttgaccagacattacgaactggcacagatggtcataacctgaaggaagatctgattgcttaactgcttcagttaagaccgaagcgctcgtcgtataacagatgcgatgatgcagaccaatcaacatggcacctgccattgctacctgtacagtcaaggatggtagaaatgttgtcggtccttgcacacgaatattacgccatttgcctgcatattcaaacagctcttctacgataagggcacaaatcgcatcgtggaacgtttgggcttctaccgatttagcagtttgatacactttctctaagtatccacctgaatcataaatcggcaaaatagagaaaaattgaccatgtgtaagcggccaatctgattccacctgagatgcataatctagtagaatctcttcgctatcaaaattcacttccaccttccactcaccggttgtccattcatggctgaactctgcttcctctgttgacatgacacacatcatctcaatatccgaatagggcccatcagtctgacgaccaagagagccataaacaccaatagccttaacatcatccccatatttatccaatattcgttccttaatttcatgaacaatcttcattctttcttctctagtcattattattggtccattcactattctcattcccttttcagataattttagatttgcttttctaaataagaatatttggagagcaccgttcttattcagctattaataactcgtcttcctaagcatccttcaatccttttaataacaattatagcatctaatcttcaacaaactggcccgtttgttgaactactctttaataaaataatttttccgttcccaattccacattgcaataatagaaaatccatcttcatcggctttttcgtcatcatctgtatgaatcaaatcgccttcttctgtgtcatcaaggtttaattttttatgtatttcttttaacaaaccaccataggagattaaccttttacggtgtaaaccttcctccaaatcagacaaacgtttcaaattcttttcttcatcatcggtcataaaatccgtatcctttacaggatattttgcagtttcgtcaattgccgattgtatatccgatttatatttatttttcggtcgaatcatttgaacttttacatttggatcatagtctaatttcattgcctttttccaaaattgaatccattgtttttgattcacgtagttttctgtattcttaaaataagttggttccacacataccaatacatgcatgtgctgattataagaattatctttattatttattgtcacttccgttgcacgcataaaaccaacaagatttttattaatttttttatattgcatcattcggcgaaatccttgagccatatctgacaaactcttatttaattcttcgccatcataaacatttttaactgttaatgtgagaaacaaccaacgaactgttggcttttgtttaataacttcagcaacaaccttttgtgactgaatgccatgtttcattgctctcctccagttgcacattggacaaagcctggatttacaaaaccacactcgatacaactttctttcgcctgtttcacgattttgtttatactctaatatttcagcacaatcttttactctttcagcctttttaaattcaagaatatgcagaagttcaaagtaatcaacattagcgattttcttttctctccatggtctcacttttccactttttgtcttgtccactaaaacccttgatttttcatctgaataaatgctactattaggacacataatattaaaagaaacccccatctatttagttatttgtttagtcacttataactttaacagatggggtttttctgtgcaaccaattttaagggttttcaatactttaaaacacatacataccaacacttcaacgcacctttcagcaactaaaataaaaatgacgttatttctatatgtatcaagataagaaagaacaagttcaaaaccatcaaaaaaagacaccttttcaggtgctttttttattttataaactcattccctgatctcgacttcgttctttttttacctctcggttatgagttagttcaaattcgttctttttaggttctaaatcgtgtttttcttggaattgtgctgttttatcctttaccttgtctacaaaccccttaaaaacgtttttaaaggcttttaagccgtctgtacgttcctaa

SEQ ID NO: 1514 - DNA, 4394 bp, synthetic construct
  misc_feature 1..4394: note = Description of Artificial Sequence: Synthetic polynucleotide
  source 1..4394: mol_type = other DNA
gcgatcgcggtctcatctagagacggcggggagctcgctgaggcttgacatgattggtgcgtatgtttgtatgaagctacaggactgatttggcgggctatgagggcgggggaagctctggaagggccgcgatggggcgcgcggcgtccagaaggcgccatacggcccgctggcggcacccatccggtataaaagcccgcgaccccgaacggtgacctccactttcagcgacaaacgagcacttatacatacgcgactattctgccgctatacataaccactcaaccttcattgtcatggccaggtgagtcgacgagcaagcccggcggatcaggcagcgtgcttgcagatttgacttgcaacgcccgcattgtgtcgacgaaggcttttggctcctctgtcgctgtctcaagcagcatctaaccctgcgtcgccgtttccatttgcaccatcgccaagaccaatcgaattcctccagccatcccatatcccatggaagcttgattgtcatcgccaggtgagtcgacgagcaagcccggcggatcaggcagcgtgcttgcagatttgacttgcaacgcccgcattgtgtcgacgaaggcttttggctcctctgtcgctgtctcaagcagcatctaaccctgcgtcgccgtttccatttgcaccatggccaagaccaatcgaattcctgcacccatccgatatcccatcgaaccttgattgtcatggccaggtgagtcgacgagcaagcccggcggatcaggcagcgtgcttgcagatttgacttgcaacgcccgcattgtgtcgacgaaggcttttggctcctctgtcgctgtctcaagcagcatctaaccctgcgtcgccgtttccatttgcaggatggccaagaccaatcgaattcctgcaggcatcccatatcccatggaagcttcattgtcatcgccaggtgagtcgacgagcaagcccggcggatcaggcagcgtgcttgcagatttgacttgcaacgcccgcattgtgtcgacgaaggcttttggctcctctgtcgctgtctcaagcagcatctaaccctgcgtcgccgtttccatttgcaggatccccaagaccaatcgaattcctgcacgcatcccatatcccatggaagcttgcatgccgggcgcgccagaaggagcgcagccaaaccaggatgatgtttgatggggtatttgagcacttgcaacccttatccggaagccccctggcccacaaaggctaggcgccaatgcaagcagttcgcatgcagcccctggagcggtgccctcctgataaaccggccagggggcctatgttctttacttttttacaagagaagtcactcaacatctaaacatatggccaagctgaccagcgccgttccggtgctcaccgcgcgcgacgtcgccggagcggtcgagttctggaccgaccggctcgggttctcccgggacttcgtggaggacgacttcgccggtgtggtccgggacgacgtgaccctgttcatcagcgcggtccaggaccaggtgagtcgacgagcaagcccggcggatcaggcagcgtgcttgcagatttgacttgcaacgcccgcattgtgtcgacgaaggcttttggctcctctgtcgctgtctcaagcagcatctaaccctgcgtcgccgtttccatttgcaggaccaggtggtgccggacaacaccctggcctgggtgtgggtgcgcggcctggacgagctgtacgccgagtggtcggaggtcgtgtccacgaacttccgggacgcctccgggccggccatgaccgagatcggcgagcagccgtgggggcgggagttcgccctgcgcgacccggccggcaactgcgtgcacttcgtggccgaggagcaggacgccccggtgaagcagaccctgaacttcgacctgctgaagctggcgggcgacgtggagagcaacccgggccccgtcgacatgcatgcacgcaagatgggtgccctcgcggtgctcgccgtcgcttgcctcgcggcagtggcatcggttgcgcatgcggccgacaccaaactcgagatgttttaaggatccccgctccgtgtaaatggaggcgctcgttgatctgagccttgccccctgacgaacggcggtggatggaagatactgctctcaagtgctgaagcggtagcttagctccccgtttcgtgctgatcagtctttttcaacacgtaaaaagcggaggagttttgcaattttgttggttgtaacgatcctccgttgattttggcctctttctccatgggcgggctgggcgtatttgaagcgggtaccagagaccttaattaagcgctcggtcgttcggctgcggcgagcggtatcagctcactcaaaggcggtaatacggttatccacagaatcaggggataacgcaggaaagaacatgtgagcaaaaggccagcaaaaggccaggaaccgtaaaaaggccgcgttgctggcgtttttccataggctccgcccccctgacgagcatcacaaaaatcgacgctcaagtcagaggtggcgaaacccgacaggactataaagataccaggcgtttccccctggaagctccctcgtgcgctctcctgttccgaccctgccgcttaccggatacctgtccgcctttctcccttcgggaagcgtggcgctttctcatagctcacgctgtaggtatctcagttcggtgtaggtcgttcgctccaagctgggctgtgtgcacgaaccccccgttcagcccgaccgctgcgccttatccggtaactatcgtcttgagtccaacccggtaagacacgacttatcgccactggcagcagccactggtaacaggattagcagagcgaggtatgtaggcggtgctacagagttcttgaagtggtggcctaactacggctacactagaagaacagtatttggtatctgcgctctgctgaagccagttaccttcggaaaaagagttggtagctcttgatccggcaaacaaaccaccgctggtagcggtggtttttttgtttgcaagcagcagattacgcgcagaaaaaaaggatctcaagaagatcctttgatcttttctacggggtctgacgctcagtggaacgaaaactcacgttaagggattttggtcatgagattatcaaagacgtcccagccaggacagaaatgcctcgacttcgctgctgcccaaggttgccgggtgacgcacaccgtggaaacggatgaaggcacgaacccagtggacataagcctgttcggttcgtaagctgtaatgcaagtagcgtatgcgctcacgcaactggtccagaaccttgaccgaacgcagcggtggtaacggcgcagtggcggttttcatggcttgttatgactgtttttttggggtacagtctatgcctcgggcatccaagcagcaagcgcgttacgccgtgggtcgatgtttgatgttatggagcagcaacgatgttacgcagcagggcagtcgccctaaaacaaagttaaacatcatgagggaagcggtgatcgccgaagtatcgactcaactatcagaggtagttggcgtcatcgagcgccatctcgaaccgacgttgctggccgtacatttgtacggctccgcagtggatggcggcctgaagccacacagtgatattgatttgctggttacggtgaccgtaaggcttgatgaaacaacgcggcgagctttgatcaacgaccttttggaaacttcggcttcccctggagagagcgagattctccgcgctgtagaagtcaccattgttgtgcacgacgacatcattccgtggcgttatccagctaagcgcgaactgcaatttggagaatggcagcgcaatgacattcttgcaggtatcttcgagccagccacgatcgacattgatctggctatcttgctgacaaaagcaagagaacatagcgttgccttggtaggtccagcggcggaggaactctttgatccggttcctgaacaggatctatttgaggcgctaaatgaaaccttaacgctatggaactcgccgcccgactgggctggtgatgagcgaaatgtagtgcttacgttgtcccgcatttggtacagcgcagtaaccggcaaaatcgcgccgaaggatgtcgctgccgactgggcaatggagcgcctgccggcccagtatcagcccgtcatacttgaagctagacaggcttatcttggacaagaagaagatcgcttggcctcgcgcgcagatcagttggaagaatttgtccactacgtgaaaggcgagatcaccaaggtagtcggcaaataactgtcagaccaagtttactcatatatactttagattgatttaaaacttcatttttaatttaaaaggatctaggtgaagatcctt

SEQ ID NO: 1515 - protein, 181 aa, Aliatypus gulosus; identical to SEQ ID NO: 1077

SEQ ID NO: 1516 - protein, 181 aa, Aliatypus gulosus; identical to SEQ ID NO: 1078

SEQ ID NO: 1517 - protein, 181 aa, Aliatypus gulosus; identical to SEQ ID NO: 1079

SEQ ID NO: 1518 - protein, 181 aa, Aliatypus gulosus; identical to SEQ ID NO: 1081

SEQ ID NO: 1519 - protein, 181 aa, Aliatypus gulosus; identical to SEQ ID NO: 1082

SEQ ID NO: 1520 - protein, 181 aa, Aliatypus gulosus; identical to SEQ ID NO: 1083

SEQ ID NO: 1521 - protein, 169 aa, Aptostichus sp.; identical to SEQ ID NO: 1084

SEQ ID NO: 1522 - protein, 169 aa, Aptostichus sp.; identical to SEQ ID NO: 1085

SEQ ID NO: 1523 - protein, 179 aa, Aptostichus sp.; identical to SEQ ID NO: 1089

SEQ ID NO: 1524 - protein, 179 aa, Aptostichus sp.; identical to SEQ ID NO: 1090

SEQ ID NO: 1525 - protein, 52 aa, Araneus diadematus
GAGAGAGVGVGGAGGYGQGYGAGAGAGAGAGAGAGGAGGYGQGYGAGAAAAA

SEQ ID NO: 1526 - protein, 42 aa, Araneus diadematus
GAGAGAAGGYGGGSGAGAGGAGGYGQGYGAGSGAGAGAAAAA

SEQ ID NO: 1527 - protein, 48 aa, Araneus diadematus
GASAGAAGGYGGGAGVGAGAGAGAAGGYGQSYGSGAGAGAGAGAAAAA

SEQ ID NO: 1528 - protein, 36 aa, Araneus diadematus
GAGGGGQGGLGSGGAGQGYGAGLGGQGGASAAAAAA

SEQ ID NO: 1529 - protein, 42 aa, Araneus diadematus
GGQGGQGGQGGYGGLGSQGAGGAGQLGYGAGQESAAAAAAAA

SEQ ID NO: 1530 - protein, 43 aa, Araneus diadematus
GGAGGGGQGGLGAGGAGQGYGAAGLGGQGGAGQGGGSGAAAAA

SEQ ID NO: 1531 - protein, 39 aa, Araneus diadematus
GGYGPGSGQQGPSQQGPGQQGPGGQGPYGPGASAAAAAA

SEQ ID NO: 1532 - protein, 29 aa, Araneus diadematus
GGYGPGSGQQGPGGQGPYGPGSSAAAAAA

SEQ ID NO: 1533 - protein, 31 aa, Araneus diadematus
GGNGPGSGQQGAGQQGPGQQGPGASAAAAAA

SEQ ID NO: 1534 - protein, 34 aa, Araneus diadematus
GGYGPGSGQQGPGQQGPGGQGPYGPGASAAAAAA

SEQ ID NO: 1535 - protein, 33 aa, Araneus diadematus
GGYGPGSGQGPGQQGPGGQGPYGPGASAAAAAA

SEQ ID NO: 1536 - protein, 39 aa, Araneus diadematus
GGYGPGSGQQGPGQQGPGQQGPGGQGPYGPGASAAAAAA

SEQ ID NO: 1537 - protein, 33 aa, Araneus diadematus
GGYGPGYGQQGPGQQGPGGQGPYGPGASAASAA

SEQ ID NO: 1538 - protein, 35 aa, Araneus diadematus
SGGYGPGSGQQGPGQQGPGGQGPYGPGASAAAAAA

SEQ ID NO: 1539 - protein, 44 aa, Araneus diadematus
GGYGPGSGQQGPGQQGPGQQGPGQQGPGGQGPYGPGASAAAAAA

SEQ ID NO: 1540 - protein, 66 aa, Araneus diadematus
GGYGPGSGQQGPGQQGPGQQGPGQQGPGQQGPGQQGPGQQGPGQQGPGQQGPGGQGAYGPGASAAA

SEQ ID NO: 1541 - protein, 62 aa, Araneus diadematus
GAAGGYGPGSGQQGPGQQGPGQQGPGQQGPGQQGPGQQGPGQQGPGQQGPYGPGASAAAAAA

SEQ ID NO: 1542 - protein, 36 aa, Araneus diadematus
GSGPGGYGPENQGPSGPGGYGPGGSGSSAAAAAAAA

SEQ ID NO: 1543 - protein, 48 aa, Araneus diadematus
SGPGGYGPGSQGPSGPGGSGGYGPGSQGASGPGGPGASAAAAAAAAAA

SEQ ID NO: 1544 - protein, 35 aa, Araneus diadematus
SGPGGYGPGSQGPSGPGAYGPGGPGSSAAAAAAAA

SEQ ID NO: 1545 - protein, 34 aa, Araneus diadematus
SGPGGYGPGSQGPSGPGVYGPGGPGSSAAAAAAA

SEQ ID NO: 1546 - protein, 43 aa, Araneus diadematus
SGPGGYGPGSQGPSGPGGSGGYGPGSQGGSGPGASAAAAAAAA

SEQ ID NO: 1547 - protein, 193 aa, Atypoides riversi; identical to SEQ ID NO: 1097

SEQ ID NO: 1548 - protein, 193 aa, Atypoides riversi; identical to SEQ ID NO: 1098

SEQ ID NO: 1549 - protein, 193 aa, Atypoides riversi; identical to SEQ ID NO: 1099

SEQ ID NO: 1550 - protein, 193 aa, Atypoides riversi; identical to SEQ ID NO: 1100

SEQ ID NO: 1551 - protein, 193 aa, Atypoides riversi; identical to SEQ ID NO: 1101

SEQ ID NO: 1552 - protein, 193 aa, Atypoides riversi; identical to SEQ ID NO: 1102

SEQ ID NO: 1553 - protein, 193 aa, Atypoides riversi; identical to SEQ ID NO: 1103

SEQ ID NO: 1554 - protein, 170 aa, Bothriocyrtum californicum
SSARSSSAAAASAAAFSSLSRALIYRLQQNQDFIYTFNSIETSDAARAITYSSALAAANAMGAGSSASQAVAFAAAKAAEGVPIRSSSYAYAEAITNAITPHFLALHLVNSANVDAFASDFTSSFASATASAASASAAASSAASAAAAATASSSSTSTSTKTTSSAAAAA

SEQ ID NO: 1555 - protein, 175 aa, Bothriocyrtum californicum; identical to SEQ ID NO: 1105

SEQ ID NO: 1556 - protein, 175 aa, Bothriocyrtum californicum; identical to SEQ ID NO: 1106

SEQ ID NO: 1557 - protein, 175 aa, Bothriocyrtum californicum; identical to SEQ ID NO: 1107

SEQ ID NO: 1558 - protein, 175 aa, Bothriocyrtum californicum
RAAASSRARAEAAAASSAAASAAAASSAFAEELTFLLRQSPNFISAFGSTASSSEATALARSSAIAAARAVGVAGAASAIASAAASAAAGVSHGSSAAAYARAIAFAVAQAFAPFGILTLAKAAAFASQFARSFSSSAAASAASAASASAASAKSAAAAAASSSTTSTSTTTTST

SEQ ID NO: 1559 - protein, 180 aa, Bothriocyrtum californicum; identical to SEQ ID NO: 1109

SEQ ID NO: 1560 - protein, 183 aa, Bothriocyrtum californicum; identical to SEQ ID NO: 1110

SEQ ID NO: 1561 - protein, 181 aa, Bothriocyrtum californicum; identical to SEQ ID NO: 1112

SEQ ID NO: 1562 - protein, 175 aa, Bothriocyrtum californicum; identical to SEQ ID NO: 1113

SEQ ID NO: 1563 - protein, 169 aa, Deinopis spinosa; identical to SEQ ID NO: 1114

SEQ ID NO: 1564 - protein, 174 aa, Deinopis spinosa; identical to SEQ ID NO: 1115

SEQ ID NO: 1565 - protein, 180 aa, Deinopis spinosa; identical to SEQ ID NO: 1116

SEQ ID NO: 1566 - protein, 174 aa, Deinopis spinosa; identical to SEQ ID NO: 1117

SEQ ID NO: 1567 - protein, 158 aa, Deinopis spinosa; identical to SEQ ID NO: 1118

SEQ ID NO: 1568 - protein, 159 aa, Deinopis spinosa; identical to SEQ ID NO: 1119

SEQ ID NO: 1569 - protein, 180 aa, Deinopis spinosa; identical to SEQ ID NO: 1120

SEQ ID NO: 1570 - protein, 175 aa, Deinopis spinosa; identical to SEQ ID NO: 1121

SEQ ID NO: 1571 - protein, 233 aa, Dolomedes tenebrosus; identical to SEQ ID NO: 1122

SEQ ID NO: 1572 - protein, 278 aa, Dolomedes tenebrosus; identical to SEQ ID NO: 1123

SEQ ID NO: 1573 - protein, 169 aa, Dolomedes tenebrosus; identical to SEQ ID NO: 1124

SEQ ID NO: 1574 - protein, 126 aa, Plectreurys tristis
GAGAGAGAGAGAGAGAGSGASTSVSTSSSSGSGAGAGAGSGAGSGAGAGSGAGAGAGAGGAGAGFGSGLGLGYGVGLSSAQAQAQAQAAAQAQAQAQAQAYAAAQAQAQAQAQAQAAAAAAAAAAA

SEQ ID NO: 1575 - protein, 126 aa, Plectreurys tristis
GAGAGAGAGAGAGAGAGSGASTSVSTSSSSGSGAGAGAGSGAGSGAGAGSGAGAGAGAGGAGAAFGSGLGLGYGVGLSSAQAQAQAQAAAQAQADAQAQAYAAAQAQAQAQAQAQAAAAAAAAAAA

SEQ ID NO: 1576 - protein, 126 aa, Plectreurys tristis
GAGAGAGAGSGAGAGAGSGASTSVSTSSSSGSGAGAGAGSGAGSGAGAGSGAGAGAGAGGAGAGFGSGLGLGYGVGLSSAQAQAQAQAAAQAQADAQAQAYAAAQAQAQAQAQAQAAAAAAAAAAA

SEQ ID NO: 1577 - protein, 126 aa, Plectreurys tristis
GAGAGAGAGSGAGAGAGSGASTSVSTSSSSGSGAGAGAGSGAGSGAGAGSGAGAGAGAGGAGAGFGSGLGLGYGVGLSSAQAQAQSAAAARAQADAQAQAYAAAQAQAQAQAQAQAAAAAAAAAAA

SEQ ID NO: 1578 - protein, 126 aa, Plectreurys tristis
GAGAGAGAGAGAGAGAGSGASTSVSTSSSSASGAGAGAGSGAGSGAGAGSGAGAGAGAGGAGAGFGSGLGLGYGVGLSSAQAQAQAQAAAQAQAQAQAQALAAAQAQAQAQAQAQAAAATAAAAAA

SEQ ID NO: 1579 - protein, 198 aa, Plectreurys tristis; identical to SEQ ID NO: 1132

SEQ ID NO: 1580 - protein, 198 aa, Plectreurys tristis; identical to SEQ ID NO: 1133

SEQ ID NO: 1581 - protein, 206 aa, Plectreurys tristis; identical to SEQ ID NO: 1135

SEQ ID NO: 1582 - protein, 206 aa, Plectreurys tristis; identical to SEQ ID NO: 1136

SEQ ID NO: 1583 - protein, 209 aa, Plectreurys tristis
GVSLSSSQATSVASAISSSLYAFNYRASAASSAAAQSSAQTASTSAKQTAASTSASTAATSTTQTAATTSASTAASSQTVQKASTSSAASTAAQQTGQSSSVQNQGSSSASSSSVSVSDISDSLTTSLLQSEEFTSAFGSTVSEAEAQSYAEAVAQSTVAQLGIDYSQSSALATAVANAVSQVKQGSSSRAYARAIAYAITTYLKTTRI

SEQ ID NO: 1584 - protein, 251 aa, Plectreurys tristis
ITTITRTQVKSFASAISSSLSTARATSSANAYQEQTTQSSAAASAAAQSSEYQTQNTQSSASAASSDASTSYQTQQSYSDASAASVAAESTSANQAQSTQSSAAASSSTNSAYQSQQSYIDASTVSSASANTAQSTYQVTIPDNTYFAESLSSTLIQHEQFNSKFGSYIPLVTAREYASAMARATALIIGFDSTGTSALESAVAVAVSNVDYASAYSYARAIAFAISNVLTNNGIFASASEALYLAPAMIA

SEQ ID NO: 1585 - protein, 85 aa, Plectreurys tristis
SLHAFGKSSFSESSAFALANSISPSTAITSAQSSSVSAGASSGQSSYDTSSVVSSASSAEATESSSVFDTYQATQIESSAAAAAA

SEQ ID NO: 1586 - protein, 181 aa, Plectreurys tristis
SSSAYDSQFSESSSASSAAASAFSEQTSYDISSDLSSASSATAAAASSSAYESQFSDASSGSSAAAAASSQQNSYDTDALYSASSAASAAASASAYELEFSDASSSSSAVAVASSQQGSYDTSSDFSSASSAAAAAASAYESKFLDASSSSSAAAAASSQQSSYETSSDLVSASSAAAAAA

SEQ ID NO: 1587 - protein, 177 aa, Plectreurys tristis
SASAYQSQFLDASSSSNAAATTSSRQSSYDTSSDFSSASIAAAAAASASSYESQFSDASSSSNAAAAASSQQSSYDTSSDLVSAASASAYESQFLDASSSSNAAATTSSQQSSYDTSSDFSSASIAAAAAASASSYESQFSDASSSSNAAAAASSQQSSYDTSSDLVSASSAAAAAA

SEQ ID NO: 1588 - protein, 228 aa, Plectreurys tristis
SASSYESQFSDASSSSNAAAAASSQQSSYDTSSDLVSASSAAAAAASASAYESQFSDASSSRNAAAAASSQQSSYDTSSDLVSASSAAAAAASASSYESQFLDASSSSNAAATTSSQQSSYDTSSDFSSASIAAAVAASASSYESQFSDASSSSKAAAAASSQQSSYDTSSDLVSASSAAAAAASASSYESQFSDASSSSNAAAAASSQQSSYDTSSDFSSANSAALA

SEQ ID NO: 1589 - protein, 239 aa, Plectreurys tristis; identical to SEQ ID NO: 1140

SEQ ID NO: 1590 - protein, 239 aa, Plectreurys tristis; identical to SEQ ID NO: 1142

SEQ ID NO: 1591 - protein, 239 aa, Plectreurys tristis; identical to SEQ ID NO: 1143

SEQ ID NO: 1592 - protein, 239 aa, Plectreurys tristis; identical to SEQ ID NO: 1144

SEQ ID NO: 1593 - protein, 242 aa, Plectreurys tristis; identical to SEQ ID NO: 1145

SEQ ID NO: 1594 - protein, 245 aa, Plectreurys tristis; identical to SEQ ID NO: 1146

SEQ ID NO: 1595 - protein, 194 aa, Agelenopsis aperta; identical to SEQ ID NO: 1148

SEQ ID NO: 1596 - protein, 194 aa, Agelenopsis aperta; identical to SEQ ID NO: 1147

SEQ ID NO: 1597 - protein, 182 aa, Araneus gemmoides; identical to SEQ ID NO: 1149

SEQ ID NO: 1598 - protein, 182 aa, Araneus gemmoides; identical to SEQ ID NO: 1150

SEQ ID NO: 1599 - protein, 176 aa, Argiope amoena; identical to SEQ ID NO: 1153

SEQ ID NO: 1600 - protein, 180 aa, Argiope argentata; identical to SEQ ID NO: 1154

SEQ ID NO: 1601 - protein, 180 aa, Argiope argentata; identical to SEQ ID NO: 1155

SEQ ID NO: 1602 - protein, 180 aa, Argiope argentata; identical to SEQ ID NO: 1156

SEQ ID NO: 1603 - protein, 180 aa, Argiope aurantia; identical to SEQ ID NO: 1158

SEQ ID NO: 1604 - protein, 180 aa, Argiope aurantia; identical to SEQ ID NO: 1159

SEQ ID NO: 1605 - protein, 180 aa, Argiope bruennichi
GNVAYQLGFNVANTLGIGNAPGLGNALSQAVSSVGVGASSSTYANAVSNAVGQFLAGQGVLNAGNAGSLASSFANALSASAASVASSAAAQSAFQGQAAASAFSRAASQRASQSAARSGAQSSSYTTTTSTSGSQAASQSASSAAAQASASSFAQASSASLAASSAFSSAFSSANSLSAL

SEQ ID NO: 1606 - protein, 180 aa, Argiope bruennichi
GNVGYQLGFNVANTLGIGNAPGLGNALSQAVSSVGVGASSSAYANAVSNAVGQFLAGQGVLNAGNAGSLASSFANALSASAASVASSAAAQSASQSQAAAAAFSRAASQSASQSAARSGAQSSSTTTTTSTSGSQAASQSASSAAAQASASSFAQASSASLAASSAFSSAFSSANSLSAL

SEQ ID NO: 1607 - protein, 181 aa, Argiope bruennichi
GNVGYQIGFNVANTLGIGNAPGLGNALSQAVSSVGVGASSSAYANAVSNAVGQFLAGQGVLNAGNAGSSLASTFANALSASAASVASSAAAQSAFQSQAAASAFSRAASQSTSQSAARSGAQSSSTTTTTSTSGSQAASQSASSAAAQASASSFAQASSASLAASSAFSSAFSSANSLSAL

SEQ ID NO: 1608 - protein, 180 aa, Argiope bruennichi; identical to SEQ ID NO: 1161

SEQ ID NO: 1609 - protein, 180 aa, Argiope bruennichi; identical to SEQ ID NO: 1162

SEQ ID NO: 1610 - protein, 180 aa, Argiope bruennichi; identical to SEQ ID NO: 1164

SEQ ID NO: 1611 - protein, 180 aa, Argiope bruennichi; identical to SEQ ID NO: 1165

SEQ ID NO: 1612 - protein, 180 aa, Argiope bruennichi; identical to SEQ ID NO: 1167

SEQ ID NO: 1613 - protein, 180 aa, Argiope bruennichi; identical to SEQ ID NO: 1169

SEQ ID NO: 1614 - protein, 180 aa, Argiope bruennichi; identical to SEQ ID NO: 1171

SEQ ID NO: 1615 - protein, 180 aa, Argiope bruennichi; identical to SEQ ID NO: 1177

SEQ ID NO: 1616 - protein, 180 aa, Argiope bruennichi; identical to SEQ ID NO: 1180

SEQ ID NO: 1617 - protein, 180 aa, Argiope bruennichi
GSLASSFASALSASAASVASSAAAQSASQSQAAASAFSRAASQSASQSAARSGARSSSTTTTTSASGSQAASQSASSAASQASASSFAQASSASLAASSSFSSAFSSANSLSALGNVAYQLGFNVANTLGIGNAPGLGAALSQAVSSVGVGASSSTYANVVSNAVGQFLAGQGVLNAANA

SEQ ID NO: 1618 - protein, 180 aa, Argiope bruennichi
GSLASSFASALSASAASVASSAAAQSASQSQAAASAFSRAASQSASQSASRSGAQSSSTTTTTSASGSQAASQSASSAASQASASSFAQASSASLAASSSFSSAFSSANSLSALGNVAYQLGFNVANTLGIGNAPGLGAALSQAVSSVGVGASSSTYANVVSNAVGQFLAGQGVLNAANA

SEQ ID NO: 1619 - protein, 180 aa, Argiope bruennichi
GSLASSFASALSASAASVASSAAAQSASQSQAAASAFSRAASQSGSQSASRSGAQSSSTTTTTSASGSQAASQSASSAASQASASSFAQASSASLAASSSFSSAFSSANSLSALGNVAYQLGFNVANTLGIGNAPGLGAALSQAVSSVGVGASSSTYANVVSNAVGQFLAGQGVLNAANA

SEQ ID NO: 1620 - protein, 186 aa, Avicularia juruensis; identical to SEQ ID NO: 1189

SEQ ID NO: 1621 - protein, 186 aa, Avicularia juruensis; identical to SEQ ID NO: 1190

SEQ ID NO: 1622 - protein, 188 aa, Deinopis spinosa; identical to SEQ ID NO: 1191

SEQ ID NO: 1623 - protein, 199 aa, Deinopis spinosa; identical to SEQ ID NO: 1192

SEQ ID NO: 1624 - protein, 206 aa, Deinopis spinosa; identical to SEQ ID NO: 1193

SEQ ID NO: 1625 - protein, 184 aa, Latrodectus hesperus; identical to SEQ ID NO: 1194

SEQ ID NO: 1626 - protein, 184 aa, Latrodectus hesperus; identical to SEQ ID NO: 1195

SEQ ID NO: 1627 - protein, 184 aa, Latrodectus hesperus; identical to SEQ ID NO: 1196

SEQ ID NO: 1628 - protein, 184 aa, Latrodectus hesperus; identical to SEQ ID NO: 1198

SEQ ID NO: 1629 - protein, 184 aa, Latrodectus hesperus; identical to SEQ ID NO: 1199

SEQ ID NO: 1630 - protein, 184 aa, Latrodectus hesperus
GILTQENAAGLASSVSSAISSAASSVAAQAASAAQSSAFAQSQAAAQAFSQAASRSASQSAAQAGSSSTSTTTTTSQAASQAASQSASSSYSAASQSAFSQASSSALASSSSFSSAFSSASSASAVGQVGYQIGLNAAQTLGISNAPAFADSVSQAVRTVGVGASPFQYANAVSNAFGQLLGGQ

SEQ ID NO: 1631 - protein, 185 aa, Latrodectus hesperus
GILTQENAAGLASSVSSAISSAASSVAAQAASAAQSSAFAQSQAAAQAFSQAASRSASQSAAQAGSSSTSTTTTTSQAASQAASQSASSSYSAASQSAFSQASSSSALASSSSFSSAFSSASSASAVGQVGYQIGLNAAQTLGISNAPAFADAVSQAVRTVGVGASPFQYANAVSNAFGQLLGGQ

SEQ ID NO: 1632 - protein, 184 aa, Latrodectus hesperus
GILTQENAAGLASSVSSAISSAASSVAAQAASAAQSSAFAQSQAAAQAFSQAASRSASQSAAQAGSSSTSTTTTTSQAASQAASQSASSSSSAASQSAFSQASSSALASSSSFSSAFSSASSASAVGQVGYQIGLNAAQTLGISNAPAFADAVSQAVRTVGVGASPFQYASAVSNAFGQLLGGQ

SEQ ID NO: 1633 - protein, 184 aa, Latrodectus hesperus
GILTQENAAGLASSVSSAISSAASSVAAQAASAAQSSAFAQSQAAAQAFSQAASRSASQSAAQAGSSSTSTTTTTSQAASQAASQSASSSYSAASQSAFSQASSSALASSSSFSSAFSSASSASAVGQVGYQIGLNAAQTLGISNAPAFADAVSQAVRTVGVGASPFQYANAVSNAFGQLLGEQ

SEQ ID NO: 1634 - protein, 171 aa, Nephila antipodiana; identical to SEQ ID NO: 1200

SEQ ID NO: 1635 - protein, 171 aa, Nephila clavata; identical to SEQ ID NO: 1201

SEQ ID NO: 1636 - protein, 171 aa, Nephila clavata; identical to SEQ ID NO: 1203

SEQ ID NO: 1637 - protein, 171 aa, Nephila clavata; identical to SEQ ID NO: 1206

SEQ ID NO: 1638 - protein, 171 aa, Nephila clavipes; identical to SEQ ID NO: 1209

SEQ ID NO: 1639 - protein, 171 aa, Nephila clavipes; identical to SEQ ID NO: 1210

SEQ ID NO: 1640 - protein, 174 aa, Nephilengys cruentata; identical to SEQ ID NO: 1211

SEQ ID NO: 1641 - protein, 302 aa, Uloborus diversus; identical to SEQ ID NO: 1213

SEQ ID NO: 1642 - protein, 278 aa, Uloborus diversus; identical to SEQ ID NO: 1212

SEQ ID NO: 1643 - protein, 302 aa, Uloborus diversus; identical to SEQ ID NO: 1215

SEQ ID NO: 1644 - protein, 143 aa, Araneus ventricosus; identical to SEQ ID NO: 1216

SEQ ID NO: 1645 - protein, 152 aa, Araneus ventricosus; identical to SEQ ID NO: 1217

SEQ ID NO: 1646 - protein, 132 aa, Araneus ventricosus; identical to SEQ ID NO: 1218

SEQ ID NO: 1647 - protein, 180 aa, Araneus ventricosus; identical to SEQ ID NO: 1219

SEQ ID NO: 1648 - protein, 182 aa, Araneus ventricosus; identical to SEQ ID NO: 1220

SEQ ID NO: 1649 - protein, 216 aa, Araneus ventricosus; identical to SEQ ID NO: 1222

SEQ ID NO: 1650 - protein, 214 aa, Araneus ventricosus; identical to SEQ ID NO: 1223

SEQ ID NO: 1651 - protein, 233 aa, Argiope argentata; identical to SEQ ID NO: 1224

SEQ ID NO: 1652 - protein, 19 aa, Deinopis spinosa
GQYGQGPGAAAAAAAAAAA

SEQ ID NO: 1653 - protein, 31 aa, Deinopis spinosa
GSGDGQGGQGDYGGGRGQYGSRSSGAAAAAA

SEQ ID NO: 1654 - protein, 32 aa, Deinopis spinosa
GGSGRQGGQRGYGGGAVTGAGAGAGAGGGSET

SEQ ID NO: 1655 - protein, 146 aa, Deinopis spinosa
GATAATTAFAQSMSSALASSPSFSSLFSSGLQTQDAVSASVSVAQTLANQVGLDNSATANLLQLVQRYVSSVGAYADAVAYANAISKALGSVLANTGQITTSTAYSTANSFAQTVTTYINNVSPRVLFSPPIGILPVPSGEAAPRE

SEQ ID NO: 1656 - protein, 30 aa, Deinopis spinosa
GGQGDQGYRVQGGYGPVSNAAASAAAAASA

SEQ ID NO: 1657 - protein, 23 aa, Deinopis spinosa
GGGQGAGQGGYGPSSGAAAASAA

SEQ ID NO: 1658 - protein, 51 aa, Deinopis spinosa
GDSGGRGGRQGYVGGAGAGAGSGAGGQGGQGQYGPGTNGAAAAAAASAASA

SEQ ID NO: 1659 - protein, 39 aa, Deinopis spinosa
GGSGSQVSQDVDQGYGGGAGLGGSGSGSGAAAAAAAAAA

SEQ ID NO: 1660 - protein, 148 aa, Latrodectus hesperus
GGYGRGQGAGAGVGAGAGAAAGAAAIARAGGYGQGAGGYGQGQGAGAAAGAAAGAGAGGYGQGAGGYGRGQGAGAGAGAGAGARGYGQGAGAGAAAGAAASAGAGGYGQGAGGYGQGQGAGAAAGAAASAGAGGYGQGAGGYGQGQGA

SEQ ID NO: 1661 - protein, 148 aa, Latrodectus hesperus; identical to SEQ ID NO: 1227

SEQ ID NO: 1662 - protein, 108 aa, Metepeira grandiosa
GAGYGAGAGAGAGYGAGAGAGAGAGAVAAGGAGAGAGRGYGAGAGAGAGAAGGAGAGAGAGYGAGAGRGYGAGSGAGAGAGAAGGAGAGAGAGYGAGAGAGAGAASGA

SEQ ID NO: 1663 - protein, 92 aa, Metepeira grandiosa
GAGAGYGAGAGRGYGAGAGAGSGAGAGAGAAGGAGAGYGAGAGAGAGSGAAAAGGAGAGAGYGAGAGRGYGAGAGAGSGAGAGAGEAGGAGA

SEQ ID NO: 1664 - protein, 145 aa, Nephila clavipes; identical to SEQ ID NO: 1231

SEQ ID NO: 1665 - protein, 150 aa, Nephila clavipes; identical to SEQ ID NO: 1232

SEQ ID NO: 1666 - protein, 153 aa, Nephila clavipes; identical to SEQ ID NO: 1233

SEQ ID NO: 1667 - protein, 161 aa, Nephila clavipes; identical to SEQ ID NO: 1234

SEQ ID NO: 1668 - protein, 179 aa, Nephilengys cruentata; identical to SEQ ID NO: 1235

SEQ ID NO: 1669 - protein, 164 aa, Nephilengys cruentata; identical to SEQ ID NO: 1236

SEQ ID NO: 1670 - protein, 50 aa, Nephilengys cruentata
GGAGGYGVGQGYGAGAGAGAAAGAGAGGAGGYGAGQGYGAGAGVGAAAAA

SEQ ID NO: 1671 - protein, 64 aa, Nephilengys cruentata
GAGAGVGGAGGYGRGAGAGAGAGAGAAAGAGAGAAAGAGAGGAGGYGAGQGYGAGAGVGAAAAA

SEQ ID NO: 1672 - protein, 68 aa, Nephilengys cruentata
GAGAGVGGAGGYGRGAGAGAGAGAGGAGGYGRGAGAGAGAGAGAGGAGGYGAGQGYGAGAGAGAAAAA

SEQ ID NO: 1673 - protein, 50 aa, Nephilengys cruentata
GAGAGAGGAGGYGRGAGAGAGAGAGAGGAGGYGAGQGYGAGAGAGAAAAA

SEQ ID NO: 1674 - protein, 46 aa, Nephilengys cruentata
GAGAGAGGAGGYGRGAGAGAGAGAGAGGAGGYGRGAGAGAGAGAAA

SEQ ID NO: 1675 - protein, 54 aa, Nephilengys cruentata
GAGAGGAGRYGAGQGYGAGAGAGAAAGAGAGGAGGYGAGQGYGAGAGAGAAAAA

SEQ ID NO: 1676 - protein, 36 aa, Nephilengys cruentata
GAGAGVGGAGGYGSGAGAGAGAGAGAASGAAAGAAA

SEQ ID NO: 1677 - protein, 70 aa, Nephilengys cruentata
GAGAGGAGGYGTGQGYGAGAGAGAGAGAGGAGGYGRGAGAGAGAGAGGAGGYGAGQGYGAGAGAGAAAAA

SEQ ID NO: 1678 - protein, 80 aa, Nephilengys cruentata
GDGAGAGGAGGYGRGAGAGAGAGAAAGAGAGGAGGYGAGQGYGAGAGAGAAAGAGAGGAGGYGAGQGYGAGAGAGAAAAA

SEQ ID NO: 1679 - protein, 102 aa, Nephilengys cruentata
GAGAGVGGAGGYGRGAGAGAGAAAGAGAGAAAGAGAGGAGGYGTGQGYGAGAGAGAGAGGAGGYGRGAGAGAGAGAGAGGAGEYGAGQGYGAGAGAGAAAAA

SEQ ID NO: 1680 - protein, 80 aa, Nephilengys cruentata
GAGAGAGGAGGYGRGAGAGAGAGAAAGAGAGGAGGYGARQGYGAGAGAGAAAGAGAGGAGGYGAGQGYGAGAGAGAAAAA

SEQ ID NO: 1681 - protein, 61 aa, Nephilengys cruentata
GAGAGAGGAGGYGRGAGAGAGAGAGAAAGQGYGSGAGAGAGASAGGAGSYGRGAGAGAAAA

SEQ ID NO: 1682 - protein, 74 aa, Nephilengys cruentata
SGAGAGGYGAGQGYGAGAGAVASAAAGAGSGAGGAGGYGRGAVAGSGAGAGAGAGGAGGYGAGAGAGAAAGAVA

SEQ ID NO: 1683 - protein, 25 aa, Nephilengys cruentata
GGSGGYGGRQGGYSAGAGAGAAAAA

SEQ ID NO: 1684 - protein, 24 aa, Nephilengys cruentata
GAGAGGTGGYGRGSGAGAAAGAAA

SEQ ID NO: 1685 - protein, 37 aa, Nephilengys cruentata
GAGAAGGYGGYGAGAGAGAGGARGYGGGAGAGAGAAA

SEQ ID NO: 1686 - protein, 42 aa, Nephilengys cruentata
GAGAGAGAGAGAAAGAGAGGAGGYGAGQGYGAGAGAGAAAAA

SEQ ID NO: 1687 - protein, 28 aa, Nephilengys cruentata
GAGAGAGGAGGFGRGAGAGAGAGAGAAA

SEQ ID NO: 1688 - protein, 28 aa, Nephilengys cruentata
GAGAGGAGGYGAGQGYGAGAGAGAAAAA

SEQ ID NO: 1689 - protein, 28 aa, Nephilengys cruentata
GAGAGAGGAGGYGRGAGAGAGAGAAAAA

SEQ ID NO: 1690 - protein, 80 aa, Nephilengys cruentata
GAGAGTGGAGGYGAGQGYGAGAGAGAGAGAGAGAGGAGGYGRGAGAGAGAGAGAGGAGGYGVGQGYGAGAGAGAGAGSAA

SEQ ID NO: 1691 - protein, 58 aa, Parawixia bistriata
GAGAGGGYGGGYGAGGGAGAGAGAGAGAGAGAGAGRGGAGGYGAGAGAGAGAAAAAAA

SEQ ID NO: 1692 - protein, 50 aa, Parawixia bistriata
GAGAGGGYGGGYGAGVGAGAGAGAGAGGGYGGGYGAGAGAGAGAAAAAAA

SEQ ID NO: 1693 - protein, 56 aa, Parawixia bistriata
GAGAGGGYGGGYGAGGGAGAGAGAGAGAGAGAGAGRGGAVGYGAGAGAGAAAAAAA

SEQ ID NO: 1694 - protein, 74 aa, Parawixia bistriata
GAGAGGGYGGGYGAGGGAGAGAGAGAGGGYGGGYGAGGGAGAGAGAGAGAGRGGAGGYGAGAGAAAGAAAAAAA

SEQ ID NO: 1695 - protein, 54 aa, Parawixia bistriata
GAGAGGGYGGGYGAGGGAGAGAGAAAGAGAGAGRGGAGGYGAGAGAGAGAAAAA

SEQ ID NO: 1696 - protein, 52 aa, Parawixia bistriata
GAGAGGGYGGGYSAGGGAGAGSGAAAGAGAGRGGAGGYSAGAGTGAGAAAGA

SEQ ID NO: 1697 - protein, 53 aa, Uloborus diversus
GSGAGAGSGYGAGAGAGAGSGYGAGSSASAGSAINTQTVTSSTTTSSQSSAAA

SEQ ID NO: 1698 - protein, 57 aa, Uloborus diversus
TGAGYGTGAGTGASAGAAASGAGAGYGGQAGYGQGAGASARAAGSGYGAGAGAAAAA

SEQ ID NO: 1699 - protein, 22 aa, Uloborus diversus
GSGYGAGAGAGAGSGYGAGAAA

SEQ ID NO: 1700 - protein, 107 aa, Uloborus diversus
GSGYGAGAGAGAGSGYGAGAGAGSGYGAGAGAGAGSGYVAGAGAGAGAGSGYGAGAGAGAGSSYSAGAGAGAGSGYGAGSSASAGSAVSTQTVSSSATTSSQSAAAA

SEQ ID NO: 1701 - protein, 21 aa, Uloborus diversus
TGAAYGTRASTGSGASAGAAA

SEQ ID NO: 1702 - protein, 21 aa, Uloborus diversus
SGAGAGYGGQAGYGQGGGAAA

SEQ ID NO: 1703 - protein, 25 aa, Uloborus diversus
YRAGAGSQAAYGQGASGSSGAAAAA

SEQ ID NO: 1704 - protein, 25 aa, Uloborus diversus
GAGAGYGGQVGYGQGAGASAGAAAA

SEQ ID NO: 1705 - protein, 25 aa, Uloborus diversus
GAGAGYGGQAGYGQGAGGSAGAAAA

SEQ ID NO: 1706 - protein, 23 aa, Uloborus diversus
GAGAGRQAGYGQGAGASARAAAA

SEQ ID NO: 1707 - protein, 19 aa, Uloborus diversus
GAGTGYGQGAGASAGAAAA

SEQ ID NO: 1708 - protein, 24 aa, Uloborus diversus
GAGAGSQVGYGQGAGASSGAAAAA

SEQ ID NO: 1709 - protein, 26 aa, Uloborus diversus
GAGAGYGGQVGYEQGAGASAGAEAAA

SEQ ID NO: 1710 - protein, 26 aa, Uloborus diversus
SSAGAGYGGQAGYGQGAGASAGAAAA

SEQ ID NO: 1711 - protein, 25 aa, Uloborus diversus
GAGAGYRGQAGYIQGAGASAGAAAA

SEQ ID NO: 1712 - protein, 26 aa, Uloborus diversus
GAGVGYGGQAGYGQGAGASAGAAAAA

SEQ ID NO: 1713 - protein, 23 aa, Uloborus diversus
GAGAGRQAGYGQGAGASAGAAAA

SEQ ID NO: 1714 - protein, 24 aa, Uloborus diversus
GADAGYGGQAGYGQGAGASAGAAA

SEQ ID NO: 1715 - protein, 26 aa, Uloborus diversus
SGAGAGYGGQAGYGQGAGASAGAAAA

SEQ ID NO: 1716 - protein, 24 aa, Uloborus diversus
GAGAGYLGQAGYGQGAGASAGAAA

SEQ ID NO: 1717 - protein, 27 aa, Uloborus diversus
GAGAGYGGQAGYGQGTGAAASAAASSA

SEQ ID NO: 1718 - protein, 24 aa, Uloborus diversus
GAASSQVVSRTTTTTSQSAAGGAA

SEQ ID NO: 1719 - protein, 14 aa, Uloborus diversus
SGYSTGVGSGAAAA

SEQ ID NO: 1720 - protein, 24 aa, Uloborus diversus
TSGAGYGGQRGYGTGAGAAAGAAA

SEQ ID NO: 1721 - protein, 28 aa, Uloborus diversus
SGTGAGYGGQAGYGQGAGASAAAAASAA

SEQ ID NO: 1722 - protein, 106 aa, Araneus ventricosus
PGGPGGVGGPLGAGAGGVGPGGAGAYGPGGAGAYGPGGAGAYGPGGAGPGGAGPYGPGGPGGAGPGGEGPVTVDVEVSVGGAPGGGPGGAGPGGAGVGPGGAPGAP

SEQ ID NO: 1723 - protein, 179 aa, Araneus ventricosus; identical to SEQ ID NO: 1250

SEQ ID NO: 1724 - protein, 114 aa, Araneus ventricosus
GGPGGPGGPGGPGGAYGPGGGGPSGPGGVGAGGAGPYGPGGLGPVGAGPYGLGGASAGGAGPYGPGGPSGAGPGGEGPVAVDVEVSVGGAPGGGAGGAGPGGAGVGPGGAPGAP

SEQ ID NO: 1725 - protein, 124 aa, Argiope trifasciata
GGAGAGGVGPGGVSGGAGGAGGSGVTVVESVSVGGAGGPGAGGVGPGGVGPGGVGPGGIYGPGGAGGLYGPGAGGAFGPGGGAGAPGGPGGPGGPGGPGGLGGGVGGAGTGGGVGPGAGGVGPS

SEQ ID NO: 1726 - protein, 114 aa, Argiope trifasciata
GGAGGTGPVSVSSTVSVGGAGGPGAGGPGAGGAGAGGVGPGGFGGPGGFGGAGGPGGPGGPGGAGGGAGGAGGLYGPGGAGGLYGPGGLYGPGGAGVPGAPGASGRAGGIGGAA

SEQ ID NO: 1727 - protein, 268 aa, Argiope trifasciata; identical to SEQ ID NO: 1252

SEQ ID NO: 1728 - protein, 268 aa, Argiope trifasciata; identical to SEQ ID NO: 1253

SEQ ID NO: 1729 - protein, 114 aa, Nephila clavipes
GGAGAGGSGPGGAGPGNVGPGRSGPGGVGPGGSGPGGVGPGSFGPGGVGPGGSGPGGVGSGGSGQGGVRPSGSGPGGVGTGGVGPGGAGGPYGPGGSGPGSAGSAGGTYGPGGF

SEQ ID NO: 1730 - protein, 71 aa, Nephila clavipes
GGPGGFGGPGGAGGPYGPGGAGGPYGPGGAGGPYGPGGAGGPYGPGGAGGPYGPGGAGGSYGLGGAGGSGG

SEQ ID NO: 1731 - protein, 71 aa, Nephila clavipes
VGPGGSGPGGYGPGGAGPGGYGPGGSGPGGYGPGGSGSGGYGPGGSGPGGSGPGGYGPGGTGPGGSESGGY

SEQ ID NO: 1732 - protein, 71 aa, Nephila clavipes
GPGGSGPGGSGPGGSGPGGSGPGGYGPGGSGPSSFVPGGSGPGGSGPGGAGPGGAGPGGVGLGGAGRGGAG

SEQ ID NO: 1733 - protein, 420 aa, Nephila clavipes
GVSYGPGGAGGPYGPGGPYGPGGEGPGGAGGPYGPGGVGPGGSGPGGYGPGGAGPGGYGPGGSGPGGYGPGGSGPGGYGPGGSGPGGYGPGGSGPGGYGPGGYGPGGSGPGGSGPGGSGPGGYGPGGTGPGGSGPGGYGPGGSGPGGSGPGGYGPGGSGPGGFGPGGSGPGGYGPGGSGPGGAGPGGVGPGGFGPGGAGPGGAAPGGAGPGGAGPGGAGPGGAGPGGAGPGGAGPGGAGGAGGAGGSGGAGGSGGTTIIEDLDITIDGADGPITISEELPISGAGGSGPGGAGPGGVGPGGSGPGGVGPGGSGPGGVGPGGSGPGGVGPGGAGGPYGPGGSGPGGAGGAGGPGGAYGPGGSYGPGGSGGPGGAGGPYGPGGEGPGGAGGPYGPGGAGGPYGPGGAGGPYGPGGEGGPYGP

SEQ ID NO: 1734 - protein, 443 aa, Nephila clavipes
GGSYGPGGAGGPYGPGGPYGPGGEGPGGAGGPYGPGGVGPGGGGPGGYGPGGAGPGGYGPGGSGPGGYGPGGSGPGGYGPGGSGPGGYGPGGSGPGGYGPGGSGPGGSGPGGYGPGGSGPGGSGPGGYGPGGSGPGGYGPGGSGPGGSGPGGYGPGGSGPGGSGPGGYGPGGSGPGGFGPGGFGPGGSGPGGYGPGGSGPGGAGPGGVGPGGFGPGGAGPGGAGPGGAGPGGAGPGGAGPGGAGPGGAGPGGAGPGGAGGAGGAGGAGGSGGAGGSGGTTIIEDLDITIDGADGPITISEELTISGAGGSGPGGAGPGGVGPGGSGPGGVGPGGSGPGGVGPGGSGPGGVGPGGAGGPYGPGGSGPGGAGGAGGPGGAYGPGGSYGPGGSGGPGGAGGPYGPGGEGPGGAGGPYGPGGAGGPYGPGGAGGPYGPGGEGGPYGP

SEQ ID NO: 1735 - protein, 413 aa, Nephila clavipes
GGSYGPGGAGGPYGPGGPYGPGGEGPGGAGGPYGPGGVGPGGGGPGGYGPGGAGPGGYGPGGSGPGGYGPGGSGPGGYGPGGSGPGGYGPGGSGPGGYGPGGSGPGGSGPGGYGPGGSGPGGYGPGGSGPGGSGPGGYGPGGSGPGGFGPGGFGPGGSGPGGYGPGGSGPGGAGPGGVGPGGFGPGGAGPGGAGPGGAGPGGAGPGGAGPGGAGPGGAGPGGAGPGGAGGAGGAGGAGGSGGAGGSGGTTIIEDLDITIDGADGPITISEELTISGAGGSGPGGAGPGGVGPGGSGPGGVGPGGSGPGGVGPGGSGAGGVGPGGAGGPYGPGGSGPGGAGGAGGPGGAYGPGGSYGPGGSGGPGGAGGPYGPGGEGPGGAGGPYGPGGAGGPYGPGGAGGPYGPGGEGGPYGP

SEQ ID NO: 1736 - protein, 404 aa, Nephila clavipes
GGSYGPGGSGGPGGAGGPYGPGGEGPGGAGGPYGPGGAGGPYGPGGAGGPYGPGGEGGPYGPGGSYGPGGAGGPYGPGGPYGPGGEGPGGAGGPYGPGGVGPGGSGPGGYGPGGSGPGGYGPGGAGPGGYGPGGSGPGGYGPGGSGPGGYGPGGSGPGGYGPGGSGPGGYGSGGAGPGGYGPGGSGPGGYGPGGSGPGGYGPGGTGPGGTGPGGSGPGGYGPGGSGPGGSGPGGSGPGGYGPSGSGPGGYGPSGSGPGGYGPGGSGPGGYGPGGSGAGGTGPGGAGGAGGAGGSGGAGGSGGAGGSGGAGGSGGVGGSGGTTITEDLDITIDGADGPITISEELTISGAGGSGPGGAGPGGVGPGGSGPGGVGPGVSGPGGVGPGGSGPGGVGSGGSGPGGVGP

SEQ ID NO: 1737 - protein, 285 aa, Nephilengys cruentata; identical to SEQ ID NO: 1260

SEQ ID NO: 1738 - protein, 269 aa, Nephilengys cruentata; identical to SEQ ID NO: 1261

SEQ ID NO: 1739 - protein, 288 aa, Nephilengys cruentata; identical to SEQ ID NO: 1262

SEQ ID NO: 1740 - protein, 177 aa, Nephila madagascariensis; identical to SEQ ID NO: 1263

SEQ ID NO: 1741 - protein, 191 aa, Nephila madagascariensis; identical to SEQ ID NO: 1264

SEQ ID NO: 1742 - protein, 195 aa, Nephila madagascariensis; identical to SEQ ID NO: 1265

SEQ ID NO: 1743 - protein, 216 aa, Nephila madagascariensis; identical to SEQ ID NO: 1266

SEQ ID NO: 1744 - protein, 198 aa, Nephila madagascariensis; identical to SEQ ID NO: 1267

SEQ ID NO: 1745 - protein, 208 aa, Nephila madagascariensis
  MOD_RES 154: note = Any amino acid
GYGPGGSGPGGYGPGGSGPGGFGPGGSGPGGYGPGGSGPGGYGPGGSGPGGAGPGGYGPGGTGPGGSGPGGYGPGGSGPGGYGPGGSGPGGYGPGGSGPGGAGPGGAGPGGAGPGGAGPGGVGPGGAGPGGSGPGGAGPGGAGRGGAGRGGAGXGGAGPGGAGGAGGAGGSGGAGGSGGTTVIEDLDITIDGADGPITISEELTINGA

SEQ ID NO: 1746 - protein, 384 aa, Nephila madagascariensis
GAGGSGPGGAGPGGVGPGGSGPGGVGPGGSGPGGVGPGGAGGPYGPGGSGPGGAGGAGGPGGAYGPGGSGGPGGAGGPYGPGGEGPGGAGGPYGPGGEGPGGAGGPYGPGGAGGPYGPGGAGGPYGPGGAGGPYGPGGAGGPYGPGGVGPGGTGPGGYGPGGAGPGGYGPGGSGPGGYGPGGSGPGGYGPGGSGPGGFGPGGSGPGGSGPGGSGPGGYGPGGSGPGGYGPGGSGPGGYGPGGSGPGGYGPGGSGPGGSGPGGYGPGGSGPGGYGPGGSGPGGAGPGGAGPGGVGPGGAGPGGAGPGGVGPGGAGPGGAGPGGAGPGGAGRGGAGPGGAGGAGGAGGSGGAGGSGGTTVIEDLDITIDGADGPITISEELTIGGA

SEQ ID NO: 1747 - protein, 100 aa, Parawixia bistriata
PGGPGGPGGPGAPGGAGGMFGPGGAGGMYGPGGAGGMYGPGGAGRGPGGAGAPGAPGGPGGPGGPGGFGGGAGAGGMVPGGASRGPGGSGPVTVTETVTV

SEQ ID NO: 1748 - protein, 70 aa, Parawixia bistriata
GGAGGPGPGGIGGSSGPGAGGAPGGFGGPGGPGGPGGPGGPGGAAGGPGAGGAGPGGSGPATVSSSVTVV

SEQ ID NO: 1749 - protein, 83 aa, Parawixia bistriata
GAGGPGGPGAGGIVPGGIYGPGGAGGVVPGGIYGPGGVPSGPGGPGGPVGPGGYGAPGGLGVGILPGTASAGTSGPTTVTEVV

SEQ ID NO: 1750 - protein, 376 aa, Latrodectus hesperus
GINVDSDIGSVTSLILSGSTLQMTIPAGGDDLSGGYPGGFPAGAQPSGGAPVDFGGPSAGGDVAAKLARSLASTLASSGVFRAAFNSRVSTPVAVQFTDALVQKIASNLGLDYATASKLRKASQAVSKVRMGSDTNAYALAISSALAEVLSSSGKVADANINQIAPQLASGIVLGVSTTAPQFGVDLSSINVNLDISNVARNMQASIQGGPAPITAEGPDFGAGYPGGAPTDLSGLDMGAPSDGSRGGDATAKLLQALVPALLKSDVFRAIYKRGTRKQVVQYVTNSALQQAASSLGLDASTISQLQTKATQALSSVSADSDSTAYAKAFGLAIAQVLGTSGQVNDANVNQIGAKLATGILRGSSAVAPRLGIDLS

SEQ ID NO: 1751 - protein, 376 aa, Latrodectus hesperus
GINVDSDIGSVTSLILSGSTLQMTIPAGGDDLSGGYPGGFPAGAQPSGGAPVDFGGPSAGGDVAAKLARSLASTLASSGVFRAAFNSRVSTPVAVQLTDALVQKIASNLGLDYATASKLRKASQAVSKVRMGSDTNAYALAISSALAEVLSSSGKVADANINQIAPQLASGIVLGVSTTAPQFGVDLSSINVNLDISNVARNMQASIQGGPAPITAEGPDFGAGYPGGAPTDLSGLDMGAPSDGSRGGDATAKLLQALVPALLKSDVFRAIYKRGTRKQVVQYVTNSALQQAASSLGLDASTISQLQTKATQALSSVSADSDSTAYAKAFGLAIAQVLGTSGQVNDANVNQIGAKLATGILRGSSAVAPRLGIDLS

SEQ ID NO: 1752 - protein, 376 aa, Latrodectus hesperus
GINVDSDIGSVTSLILSGSTLQMTIPAGGDDLSGGYPGGLPSGAQPSGGAPVDFGGPSAGGDVAAKLARSLASTLASSGVFRAAFNSRVSTPVAVQLTDALVQKIASNLGLDYATASKLRKASQAVSKVRMGSDTNAYALAISSALAEVLSSSGKVADANINQIAPQLASGIVLGVSTTAPQFGVDLSSINVNLDISNVARNMQASIQGGPAPITAEGPDFGAGYPGGAPTDLSGLDMGAPSDGSRGGDATAKLLQALVPALLKSDVFRAIYKRGTRKQVVQYVTNSALQQAASSLGLDASTISQLQTKATQALSSVSADSDSTAYAKAFGLAIAQVLGTSGQVNDANVNQIGAKLATGILRGSSAVAPRLGIDLS

SEQ ID NO: 1753 - protein, 376 aa, Latrodectus hesperus
GINVDSDIGSVTSLILSGSTLQMTIPAGGDDLSGGYPGGFPSGAQPSGGAPVDFGGPSAGGDVAAKLARSLASTLASSGVFRAAFNSRVSTPVAVQLTDALVQKIASNLGLDYATASKLRKASQAVSKVRMGSDTNAYALAISSALAEVLLSSGKVADANINQIAPQLASGIVLGVSTAAPQFGVDLSSINVNLDISNVARNMQASIQGGPAPITAEGPDFGAGYPGGAPTDLSGLDMGAPSDGSRGGDATAKLLQALVPALLKSDVFRAIYKRGTRKQVVQYVTNSALQQAASSLGLDASTISQLQTKATQALSSVSADSDSTAYAKAFGLAIAQVLGTSGQVNDANVNQIGAKLATGILRGSSAVAPRLGIDLS

SEQ ID NO: 1754 - protein, 376 aa, Latrodectus hesperus
GINVDSDIGSVTSLILSGSTLQMTIPAGGDDLSGGYPGGFPAGAQPSGGAPVDFGGPSAGGDVAAKLARSLASTLASSGVFRAAFNSRVSTPVAVQLTDALVQKIASNLGLDYATASKLRKASQAVSKVRMGSDTNAYALAISSALAEVLSSSGKVADANINQIAPQLASGIVLGVSTTAPQFGVDLSSINVNLDISNVARNMQASIQGGPAPITAEGPDFGAGYPGGAPADLSGLDMGAPSDGSRGGDATAKLLQALVPALLKSDVFRAIYKRGTRKQVVQYVTNSALQQAASSLGLDASTISQLQTKATQALSSVSADSDSTAYAKAFGLAIAQVLGTSGQVNDANVNQIGAKLATGILRGSSAVAPRLGIDLS

SEQ ID NO: 1755 - protein, 376 aa, Latrodectus hesperus
GINVDSDIGSVTSLILSGSTLQMTIPAGGDDLSGGYPGGFPAGAQPSGGAPVDFGGPSAGGDVAAKLARSLASTLASSGVFRAAFNSRVSTPVAVQLTDALVQKIASNLGLDYATASKLRKASQAVSKVRMGSDTNAYALAISSALAEVLSSSGKVADANINQIAPQLASGIVLGVSTTAPQFGVDLSSINVNLDISNVARNMQASIQGGPAPITAEGPDFGAGYPGGAPTDLSGLDMGAPSDGSHGGDATAKLLQALVPALLKSDVFRAIYKRGTRKQVVQYVTNSALQQAASSLGLDASTISQLQTKATQALSSVSADSDSTAYAKAFGLAIAQVLGTSGQVNDANVNQIGAKLATGILRGSSAVAPRLGIDLS

SEQ ID NO: 1756 - protein, 376 aa, Latrodectus hesperus
GINVDSDIGSVTSLILSGSTLQMTIPAGGDDLSGSYPGGFPAGAQPSGGAPVDFGGPSAGGDVAAKLARSLASTLASSGVFRAAFNSRVSTPVAVQLTDALVQKIASNLGLDYATASKLSKASQAVSKVRMGSDTNAYALAISSALAEVLSSSGKVADANINQIAPQLASGIVLGVSTTAPQFGVDLSSINVNLDISNVARNMQASIQGGPAPITAEGPDFGAGYPGGAPTDLSGLDMGAPSDGSRGGDATAKLLQALVPALIKSDVFRAIYKRGTRKQVVQYVTNSALQQAASSLGLDASTISQLQTKATQALSSVSADSDSTAYAKAFGLAIAQVLGTSGQVNDANVNQIGAKLATGILRGSSAVAPRLGIDLS

SEQ ID NO: 1757 - protein, 215 aa, Argiope amoena; identical to SEQ ID NO: 1281

SEQ ID NO: 1758 - protein, 215 aa, Argiope amoena; identical to SEQ ID NO: 1282

SEQ ID NO: 1759 - protein, 215 aa, Argiope amoena; identical to SEQ ID NO: 1283

SEQ ID NO: 1760 - protein, 215 aa, Argiope amoena; identical to SEQ ID NO: 1284

SEQ ID NO: 1761 - protein, 203 aa, Araneus ventricosus; identical to SEQ ID NO: 1285

SEQ ID NO: 1762 - protein, 203 aa, Araneus ventricosus; identical to SEQ ID NO: 1286

SEQ ID NO: 1763 - protein, 203 aa, Araneus ventricosus; identical to SEQ ID NO: 1288

SEQ ID NO: 1764 - protein, 203 aa, Araneus ventricosus; identical to SEQ ID NO: 1289

SEQ ID NO: 1765 - protein, 203 aa, Araneus ventricosus; identical to SEQ ID NO: 1290

SEQ ID NO: 1766 - protein, 203 aa, Araneus ventricosus; identical to SEQ ID NO: 1291

SEQ ID NO: 1767 - protein, 200 aa, Argiope trifasciata; identical to SEQ ID NO: 1293

SEQ ID NO: 1768 - protein, 200 aa, Argiope trifasciata; identical to SEQ ID NO: 1294

SEQ ID NO: 1769 - protein, 200 aa, Argiope trifasciata; identical to SEQ ID NO: 1296

SEQ ID NO: 1770 - protein, 200 aa, Argiope trifasciata; identical to SEQ ID NO: 1298

SEQ ID NO: 1771 - protein, 200 aa, Argiope trifasciata
GAGYTGPSGPSTGPSGYPGPLGGGAPFGQSGFGGSAGPQGGFGATGGASAGLISRVANALANTSTLRTVLRTGVSQQIASSVVQRAAQSLASTLGVDGNNLARFAVQAVSRLPAGSDTSAYAQAFSSALFNAGVLNASNIDTLGSRVLSALLNGVSSAAQGLGINVDSGSVQSDISSSSSFLSTSSSSASYSQALASSTS

SEQ ID NO: 1772 - protein, 189 aa, Parawixia bistriata; identical to SEQ ID NO: 1301

SEQ ID NO: 1773 - protein, 189 aa, Parawixia bistriata; identical to SEQ ID NO: 1302

SEQ ID NO: 1774 - protein, 357 aa, Uloborus diversus
GASAADIATAIAASVATSLQSNGVLTASNVSQLSNQLASYVSSGLSSTASSLGIQLGASLGAGFGASAGLSASTDISSSVEATSASTLSSSASSTSVVSSINAQLVPALAQTAVLNAAFSNINTQNAIRIAELLTQQVGRQYGLSGSDVATASSQIRSALYSVQQGSASSAYVSAIVGPLITALSSRGVVNASNSSQIASSLATAILQFTANVAPQFGISIPTSAVQSDLSTISQSLTAISSQTSSSVDSSTSAFGGISGPSGPSPYGPQPSGPTFGPGPSLSGLTGFTATFASSFKSTLASSTQFQLIAQSNLDVQTRSSLISKVLINALSSLGISASVASSIAASSSQSLLSVSA

SEQ ID NO: 1775 - protein, 171 aa, Agelenopsis aperta; identical to SEQ ID NO: 1307

SEQ ID NO: 1776 - protein, 169 aa, Agelenopsis aperta; identical to SEQ ID NO: 1308

SEQ ID NO: 1777 - protein, 164 aa, Agelenopsis aperta; identical to SEQ ID NO: 1309

SEQ ID NO: 1778 - protein, 168 aa, Agelenopsis aperta; identical to SEQ ID NO: 1310

SEQ ID NO: 1779 - protein, 168 aa, Aphonopelma seemanni; identical to SEQ ID NO: 1311

SEQ ID NO: 1780 - protein, 34 aa, Araneus bicentenarius
GGYGPGSGQQGPGQQGPGQQGPYGPGAAAAAAAA

SEQ ID NO: 1781 - protein, 34 aa, Araneus bicentenarius
GGYGPGSGQQGPVQQGPGQQGPYGPGASAAAAAA

SEQ ID NO: 1782 - protein, 39 aa, Araneus bicentenarius
GGYGPGSGQQGPGQQGPGQQGPGQQGPYGAGASAAAAAA

SEQ ID NO: 1783 - protein, 35 aa, Araneus ventricosus
GGQGGQGGYGGLGSQGAGQGGYGAGQGAAAAAAAA

SEQ ID NO: 1784 - protein, 39 aa, Araneus ventricosus
GGAGGAGRGGLGAGGAGQGYGAGLGGQGGAGQAAAAAAA

SEQ ID NO: 1785 - protein, 42 aa, Araneus ventricosus
GGAGGARQGGLGAGGAGQGYGAGLGGQGGAGQGGAAAAAAAA

SEQ ID NO: 1786 - protein, 36 aa, Araneus ventricosus
GGQGGQGGYGGLGSQGAGQGGYGAGQGGAAAAAAAA

SEQ ID NO: 1787 - protein, 38 aa, Araneus ventricosus
GGQGGQGGYGGLGSQGAGQGGYGGRQGGAGAAAAAAAA

SEQ ID NO: 1788 - protein, 42 aa, Araneus ventricosus
GGAGGAGQGGLGAGGAGQGGYGGGAYGGQGAASSAAAASAAA

SEQ ID NO: 1789 - protein, 54 aa, Argiope amoena
GGYGPGSGQRGPGSGGQGAGGQGSGQQGPGGAGQRGPGGQGPYGPGASAAAAAA

SEQ ID NO: 1790 - protein, 42 aa, Argiope amoena
GGYGPGAGQQGPGSQGPGSGGQQGPGGQGPYGPGAVAAAAAA

SEQ ID NO: 1791 - protein, 42 aa, Argiope amoena
GGYGPGAGQQGPGSQGPGSGGQQGPGGQGPYGPSAAAAAAAA

SEQ ID NO: 1792 - protein, 47 aa, Argiope amoena
GGYGPGAGQQGPGGAGQQGPGSQGPGGAGQQGPGGQGPYGPSAAAAA

SEQ ID NO: 1793 - protein, 46 aa, Argiope amoena
GSYGPRAGQQRPGAGQQGPGAGQQGPGGAGQRGPYGPGAAAAAAAA

SEQ ID NO: 1794 - protein, 42 aa, Argiope amoena
GGYGQQGPGAGQQGPGVGQQGPGGAGQRGPYGPGAAAAAAAA

SEQ ID NO: 1795 - protein, 28 aa, Argiope amoena
GGYGPRYGQQGPGAGPYGPGAGATAAAA

SEQ ID NO: 1796 - protein, 24 aa, Argiope amoena
GGYGPGAGQQGPRSQAPVASAAAA

SEQ ID NO: 1797 - protein, 49 aa, Argiope aurantia
  MOD_RES 13: note = Any amino acid
GGYGPGAGQQGPXGAGQQGPGSQGPGGAGQQGPGGQGPYGPGAAAAAAA

SEQ ID NO: 1798 - protein, 43 aa, Argiope aurantia
VGGYGPGAGQQGPGSQGPGSGGQQGPGGQGPYGPSAAAAAAAA

SEQ ID NO: 1799 - protein, 42 aa, Argiope aurantia
GGYGPGAGQQGPGSQGPGSGGQQGPGGLGPYGPSAAAAAAAA

SEQ ID NO: 1800 - protein, 42 aa, Argiope aurantia
GGYGPGAGQQGPGSQGPGSGGQQRPGGLGPYGPSAAAAAAAA

SEQ ID NO: 1801 - protein, 37 aa, Argiope bruennichi
GSAPQGAGGPAPQGPSQQGPVSQGPYGPGAAAAAAAA

SEQ ID NO: 1802 - protein, 56 aa, Argiope bruennichi
GGYGPGAGQQGPGSQGPGSGGQQGPGSQGPGSGGQQGPGGQGPYGPSAAAAAAAAA

SEQ ID NO: 1803 - protein, 41 aa, Argiope bruennichi
GGYGPGAGQQGPGSQGPGSGGQQGPGGQGPYGPGAAAAAAA

SEQ ID NO: 1804 - protein, 59 aa, Argiope bruennichi
GGYGPGAGQQGPGSGGQQGPGGQGPYGSGQQGPGGAGQQGPGGQGPYGPGAAAAAAAAA

SEQ ID NO: 1805 - protein, 70 aa, Argiope bruennichi
GGYGPGAGQQGPGGAGQQGPGSQGPGGQGPYGPGAGQQGPGSQGPGSGGQQGPGGQGPYGPSAAAAAAAA

SEQ ID NO: 1806 - protein, 55 aa, Argiope bruennichi
GGYGPGAGQQGPGSQGPGSGGQQGPGSQGPGSGGQQGPGGQGPYGPSAAAAAAAA

SEQ ID NO: 1807 - protein, 71 aa, Argiope bruennichi
GGYGPGAGQQGPGGAGQQGPGSQGPGGQGPYGPGAGQQGPGSQGPGSGGQQGPGGQGPYGPSAAAAAAAAA

SEQ ID NO: 1808 - protein, 59 aa, Argiope bruennichi
GGYGPGAGQRSQGPGGQGPYGPGAGQQGPGSQGPGSGGQQGPGGQGPYGPSAAAAAAAA

SEQ ID NO: 1809 - protein, 39 aa, Argiope bruennichi
GPGAGRQGPGSQGPGSGGQQGPGGQGPYGPSAAAAAAAA

SEQ ID NO: 1810 - protein, 61 aa, Argiope bruennichi
GPGARRQGPGSQGPGSGGQQGPGGQGPYGSGQQGPGGAGQQGPGGQGPYGPGAAAAAAAAA

SEQ ID NO: 1811 - protein, 53 aa, Argiope bruennichi
GGYGPGAGQQGPGGAGQQGPEGPGSQGPGSGGQQGPGGQGPYGPGAAAAAAAV

SEQ ID NO: 1812 - protein, 42 aa, Argiope bruennichi
GGYGPGAGQQGPGSQGPGSGGQQGPGGQGPYGPGAAAAAAAV

SEQ ID NO: 1813 - protein, 90 aa, Argiope bruennichi
GGYGPGAGQQGPGSGGQQGPGGQGPYGSGQQGPGGAGQQGPGGQGPYGGGYGPGAGQQGPGSQGPGSGGQQGPGGQGPYGPSAAAAAAAA

SEQ ID NO: 1814 - protein, 70 aa, Argiope bruennichi
GGYGPGAGQQGPGGAGQQGPGSQGPGGQGPYGPGAGQQGPGSQGPGSGGQQGPGSQGPYGPSAAAAAAAA

SEQ ID NO: 1815 - protein, 34 aa, Argiope bruennichi
GGQGGRGGFGGLGSQGEGGAGQGGAGAAAAAAAA

SEQ ID NO: 1816 - protein, 36 aa, Argiope bruennichi
GADGGFGLGGYGAGRGYGAGLGGAGGAGAASAAAAA

SEQ ID NO: 1817 - protein, 34 aa, Argiope bruennichi
GGQGGRSGFGGLGSQGAGGAGQGGAGAAAAAAAA

SEQ ID NO: 1818 - protein, 36 aa, Argiope bruennichi
GADGGSGLGGYGAGRGYGASLGGADGAGAASAAAAA

SEQ ID NO: 1819 - protein, 34 aa, Argiope bruennichi
GGQGGRGGFGGLGSQGAGGAGQGGAGAAAAAAAA

SEQ ID NO: 1820 - protein, 36 aa, Argiope bruennichi
SGDGGSGLGGYGAGRGYGAGLGGAGGAGAASAAAAA

SEQ ID NO: 1821 - protein, 34 aa, Argiope bruennichi
GGEGGRGGFGGLGSQGAGGAGQGGSLAAAAAAAA

SEQ ID NO: 1822 - protein, 36 aa, Argiope bruennichi
GADGGSGLGGYGAGRGYGAGLGGADGAGAASAAAAA

SEQ ID NO: 1823 - protein, 34 aa, Argiope bruennichi
GGQGGRGGFGRLGSQGAGGAGQGGAGAAAAVAAA

SEQ ID NO: 1824 - protein, 36 aa, Argiope bruennichi
GGDGGSGLGGYGAGRGYGAGLGGAGGAGAASAAAAA

SEQ ID NO: 1825 - protein, 29 aa, Argiope bruennichi
GGQGGRGGFGGLGSQGAGGAGQGGAGAAA

SEQ ID NO: 1826 - protein, 36 aa, Argiope bruennichi
SGDGGSGLGGYGAGRGYGAGLGGADGAGAASAASAA

SEQ ID NO: 1827 - protein, 34 aa, Argiope bruennichi
GGQGGRGGFGGLGSQGAGGAGQGGAGAAAAAATA

SEQ ID NO: 1828 - protein, 36 aa, Argiope bruennichi
GGDGGSGLGGYGAGRGHGVGLGGAGGAGAASAAAAA

SEQ ID NO: 1829 - protein, 36 aa, Argiope bruennichi
GGDGGSGLGGYGAGRGHGAGLGGAGGAGAASAAAAA

SEQ ID NO: 1830 - protein, 34 aa, Argiope bruennichi
GGQGGRGGFGGLGSQGSGGAGQGGSGAAAAAAAA

SEQ ID NO: 1831 - protein, 36 aa, Argiope bruennichi
GGQGGRGGFGGLGSQGAGGAGQGGSGAAAAAAAAVA

SEQ ID NO: 1832 - protein, 34 aa, Argiope bruennichi
DGGSGLGGYGAGRGYGAGLGGAGGAGAASAAAAT

SEQ ID NO: 1833 - protein, 34 aa, Argiope bruennichi
GGQGGRGGFGGLSSQGAGGAGQGGSGAAAAAAAA

SEQ ID NO: 1834 - protein, 38 aa, Argiope bruennichi
GGDGGSGLGDYGAGRGYGAGLGGAGGAGVASAAASAAA

SEQ ID NO: 1835 - protein, 34 aa, Argiope trifasciata
GGQGGQGGYDGLGSQGAGQGGYGQGGAAAAAAAA

SEQ ID NO: 1836 - protein, 43 aa, Argiope trifasciata
SGAGSAQRGGLGAGGAGQGYGAGSGGQGGAGQGGAAAATAAAA

SEQ ID NO: 1837 - protein, 34 aa, Argiope trifasciata
GGQGGQGGYGGLGSQGSGQGGYGQGGAAAAAAAA

SEQ ID NO: 1838 - protein, 43 aa, Argiope trifasciata
SGDGGAGQEGLGAGGAGQGYGAGLGGQGGAGQGGAAAAAAAAA

SEQ ID NO: 1839 - protein, 34 aa, Argiope trifasciata
GGQGGQGGYGGLGSQGAGQGGYGQGGAAAAAAAA

SEQ ID NO: 1840 - protein, 43 aa, Argiope trifasciata
SGAGGAGQGGLGAAGAGQGYGAGSGGQGGAGQGGAAAAAAAAA

SEQ ID NO: 1841 - protein, 34 aa, Argiope trifasciata
GGQGGQGGYGGLGSQGAGQGGYGQGGVAAAAAAA

SEQ ID NO: 1842 - protein, 43 aa, Argiope trifasciata
SGAGGAGRGGLGAGGAGQEYGAVSGGQGGAGQGGEAAAAAAAA

SEQ ID NO: 1843 - protein, 43 aa, Argiope trifasciata
SGAGGARRGGLGAGGAGQGYGAGLGGQGGAGQGSASAAAAAAA

SEQ ID NO: 1844 - protein, 43 aa, Argiope trifasciata
SGAGGAGRGSLGAGGAGQGYGAGLGGQGGAGQGGAAAAASAAA

SEQ ID NO: 1845 - protein, 32 aa, Argiope trifasciata
GGQGGQGGYGGLGSQGAGQGGYGQGGAAAAAA

SEQ ID NO: 1846 - protein, 46 aa, Argiope trifasciata
SAGGQGGQGGYGGLGSQGAGQGGYGGGAFSGQQGGAASVATASAAA

SEQ ID NO: 1847 - protein, 49 aa, Argiope trifasciata
GGYGPGAGQQGQQAGQGSGQQGPGGAGQGGPRGQGPYGPGAATAAAAAA

SEQ ID NO: 1848 - protein, 43 aa, Argiope trifasciata
GPGYGPGAGQQGPGSQGPGSGGQQGPGSQGPYGPSAAAAAAAA

SEQ ID NO: 1849 - protein, 43 aa, Argiope trifasciata
GPGYGPGAGQQGPGSQGPRSGGQQGPGGQGPYGPSAAAAAAAA

SEQ ID NO: 1850 - protein, 55 aa, Argiope trifasciata
GPGYGPGAGQQGPGSGGQQGGPGSGQQGPGGAGQGGPRGQGPYGPGAAAAAAAAA

SEQ ID NO: 1851 - protein, 42 aa, Argiope trifasciata
GGYGPGAGQQGPGSQGPGSGGQQGPGSQGPYGPSAAAAAAAA

SEQ ID NO: 1852 - protein, 43 aa, Argiope trifasciata
GPGYGPGAGQQGPGSQGPGSGGQQGPGGQGPYGPSAAAAAAAA

SEQ ID NO: 1853 - protein, 55 aa, Argiope trifasciata
GPGYGPGAGQQGPGSGGQQGGQGSGQQGPGGAGQGGPRGQGPYGPGAAAAAAAAA

SEQ ID NO: 1854 - protein, 54 aa, Argiope trifasciata
GPGYGPGAGQQGPGSGGQQGGQGSGQQGPGGAGQGGPRGQGPYGPGAAAAAAAA

SEQ ID NO: 1855 - protein, 43 aa, Argiope trifasciata
GPGYGPGAGQQGPGSQGPGSGGQQGPGGQGPYGPSDAAAAAAA

SEQ ID NO: 1856 - protein, 184 aa, Avicularia juruensis; identical to SEQ ID NO: 1332

SEQ ID NO: 1857 - protein, 183 aa, Avicularia juruensis
GAAAASGTAASAAATSTTTTTSTSRAAAAASAAAAASASGAADAAGAASAASAASASSSLQQSLGSALAQSSSFAAAFAQANSAASAAAIAYALAQTVANQIGFSSYSSAFASAASSAVSSLGGFASASAYAFAFASAFSQVLSNYGLLNINNAYSLASSIASAASSSASSAAAAASYSFSAT

SEQ ID NO: 1858 - protein, 177 aa, Avicularia juruensis; identical to SEQ ID NO: 1334

SEQ ID NO: 1859 - protein, 183 aa, Avicularia juruensis; identical to SEQ ID NO: 1001

SEQ ID NO: 1860 - protein, 32 aa, Deinopis spinosa
GPGGYGGPGQQGPGQGQQQGPASAAAAAAAAA

SEQ ID NO: 1861 - protein, 44 aa, Deinopis spinosa
GPGGYGGPGQQRPGQAQYGRGTGQQGQGPGAQQGPASAAAAAAA

SEQ ID NO: 1862 - protein, 34 aa, Deinopis spinosa
GAGLYGGPGQQGPGQGQQQGPASAAAAAAAAAAA

SEQ ID NO: 1863 - protein, 30 aa, Deinopis spinosa
GPGGYGGPGQQGPGQAQQQGPASAAAAAAA

SEQ ID NO: 1864 - protein, 32 aa, Deinopis spinosa
GPGGYSGPGQQGPGQAQQQGPASAAAAAAAAA

SEQ ID NO: 1865 - protein, 33 aa, Deinopis spinosa
GPGGYGGPGQQGPGQGQQQGPASAAAAAAATAA

SEQ ID NO: 1866 - protein, 46 aa, Deinopis spinosa
GPGGYGGPGQQGPGQGQYGPGTGQQGQGPSGQQGPAGAAAAAAAAA

SEQ ID NO: 1867 - protein, 46 aa, Deinopis spinosa
GPGGYGGPGQQGPGQGQYGPGAGQQGQGPGGQQGPAGAAAAAAAAA

SEQ ID NO: 1868 - protein, 30 aa, Deinopis spinosa
GPGGYGGPGQQGPGQGQQQGRAGAAAAAAA

SEQ ID NO: 1869 - protein, 25 aa, Deinopis spinosa
GPGGYGGPGQQGPGQAQQQGPAAAA

SEQ ID NO: 1870 - protein, 35 aa, Deinopis spinosa
SAGPGGYGGPGQQGPGQGQQKGPASAAAAAAATAA

SEQ ID NO: 1871 - protein, 46 aa, Deinopis spinosa
GPGGYGGPGQQGPGQGQYGPGTGQQGQGPGGQQGPASAAAAAAAAA

SEQ ID NO: 1872 - protein, 44 aa, Deinopis spinosa
GPGGYGGPGQPGPGQGQYGPGPGQQGPRQGGQQGPASAAAAAAA

SEQ ID NO: 1873 - protein, 33 aa, Deinopis spinosa
GPGGYGGPGQQGPRQGQQQGPASAAAAAAAAAA

SEQ ID NO: 1874 - protein, 31 aa, Deinopis spinosa
GPRGYGGPGQQGPVQGGQQGPASAAAAAAAA

SEQ ID NO: 1875 - protein, 47 aa, Deinopis spinosa
GVGGYGGPGQQGPGQGQYGPGTGQQGQGPSGQQGPAGAAAAAAGGAA

SEQ ID NO: 1876 - protein, 43 aa, Deinopis spinosa
GPGGYGGPGQQGPGQGQYGPGAGQQGQGPGSQQGPASAAAAAA

SEQ ID NO: 1877 - protein, 49 aa, Deinopis spinosa
GSGGYGSQGAGQGGQQGRGQGGQGQYGPGEGEQVPGQGGQGPAASAATA

SEQ ID NO: 1878 - protein, 39 aa, Deinopis spinosa
SAGGPGEYGGQQGPGQGGQQQPGQGGQGPSAAAAASAAV

SEQ ID NO: 1879 - protein, 27 aa, Deinopis spinosa
GSGGYGSQGQQGQGGQGPTASAAAAAA

SEQ ID NO: 1880 - protein, 61 aa, Deinopis spinosa
SVAGPGGYGASGQQGPRQGSQQGRFGPAAGQQGPGQTGQMGPGQQGPSGPSSAAAASAAAA

SEQ ID NO: 1881 - protein, 70 aa, Deinopis spinosa
SSGGYGSQGAGQGGQQGSGQGGPAAAGPGGYGGPGQQGPEQGQYGSGAGQQGQGPGGQQGPASAAAAAAA

SEQ ID NO: 1882 - protein, 38 aa, Deinopis spinosa
GPGRYGGPGQQGPGQGQYGPGTGQQGQGPASAAAAAAA

SEQ ID NO: 1883 - protein, 42 aa, Deinopis spinosa
GPGGYGGPGQQGPGQGRGTGQQGQGLGGQQGPDSAAAAAAAA

SEQ ID NO: 1884 - protein, 46 aa, Deinopis spinosa
GPGGYGGPGQQGPGQGQYGPGTGQQGQGPGGQQGPVGAAAAAAAAV

SEQ ID NO: 1885 - protein, 58 aa, Deinopis spinosa
SSGGYGSQGAGQGGQQGSGQRGPAAAGPGGYSGPGQQGPGQGGQQGPASAAAAAAAAA

SEQ ID NO: 1886 - protein, 41 aa, Deinopis spinosa
GPGGYVGSGQQGPGQGRGTGQQGQGTGGQQGPASAAASAAA

SEQ ID NO: 1887 - protein, 32 aa, Deinopis spinosa
GPGGYGGPGQQGPGQGGQQGPATAAAAAAAAA

SEQ ID NO: 1888 - protein, 46 aa, Deinopis spinosa
GPGGYGGPGQQGPGQGQYGPGTGQQGQGPGGQQGPAGAAATAAAAA

SEQ ID NO: 1889 - protein, 44 aa, Deinopis spinosa
GPGGYGGPGQQGPEQGQYRPGAGQQGQGPGGQQGPASAAAAAAA

SEQ ID NO: 1890 - protein, 38 aa, Deinopis spinosa
GPGGYGGPGQQGPGRGQYGPGTGQQGQGPASAAAAAAA

SEQ ID NO: 1891 - protein, 41 aa, Deinopis spinosa
GPGGYGGPGQQGPGQGRGTGQQGQGLGGQQGPDSAAAAAAA

SEQ ID NO: 1892 - protein, 41 aa, Deinopis spinosa
GPGGYGGSGQQGPGQGRGTGQQGQGPGGQQGPASAAAAAAA

SEQ ID NO: 1893 - protein, 38 aa, Deinopis spinosa
GPGGYGGPGQQGPGQGQYGPGTGQQGQGPASAAAAAAA

SEQ ID NO: 1894 - protein, 46 aa, Deinopis spinosa
GPGGYGGPGQQGPGQGQYGPGTGQQGQGPGGQQGPGGASAAAAAAA

SEQ ID NO: 1895 - protein, 39 aa, Diguetia canities
GTGGVGGLFLSSGDFGRGGAGAGAGAAAASAAAASSAAA

SEQ ID NO: 1896 - protein, 39 aa, Diguetia canities
GARGGSGFGVGTGGFGRGGAGAGTGAAAASAAAASAAAA

SEQ ID NO: 1897 - protein, 39 aa, Diguetia canities
GAGGDGGLFLSSGDFGRGGAGAGAGAAAASAAAASSAAA

SEQ ID NO: 1898 - protein, 39 aa, Diguetia canities
GARGGSGFGVGTGGFGRGGAGDGASAAAASAAAASAAAA

SEQ ID NO: 1899 - protein, 39 aa, Diguetia canities
GAGGDSGLFLSSGDFGRGGAGAGAGAAAASAAAASAAAA

SEQ ID NO: 1900 - protein, 39 aa, Diguetia canities
GARGGSGFGVGTGGFGRGGPGAGTGAAAASAAAASAAAA

SEQ ID NO: 1901 - protein, 39 aa, Diguetia canities
GAGGDSGLFLSSEDFGRGGAGAGTGAAAASAAAASAAAA

SEQ ID NO: 1902 - protein, 39 aa, Diguetia canities
GAGGDSGLFLSSGDFGRGGAGAGAGAAAASAAAASAASA

SEQ ID NO: 1903 - protein, 40 aa, Diguetia canities
GAGRGTGFGERILIGGSRGFGGARVDAPAASTASASAAAA

SEQ ID NO: 1904 - protein, 19 aa, Diguetia canities
GSGAGQAAGTGAAAAAAAA

SEQ ID NO: 1905 - protein, 56 aa, Diguetia canities
GASGAGPSVSYEITQAFGGSGAGAASAAAAAAAAANAAAAQQQQAAATAAAAAAAA

SEQ ID NO: 1906 - protein, 22 aa, Diguetia canities
GSGAGQGTGAGAGAAAAAAGAA

SEQ ID NO: 1907 - protein, 24 aa, Diguetia canities
GSGAGQGAGSGAGAAAAAAAASAA

SEQ ID NO: 1908 - protein, 22 aa, Diguetia canities
GAGQGAGSGSGAGAAAAAAAAA

SEQ ID NO: 1909 - protein, 25 aa, Diguetia canities
GAGQGAGSGSGAGAAAAAAAAAAAA

SEQ ID NO: 1910 - protein, 20 aa, Diguetia canities
QQQQQQQAAAAAAAAAAAAA

SEQ ID NO: 1911 - protein, 36 aa, Diguetia canities
GSGQGASFGVTQQFGAPSGAASSAAAAAAAAAAAAA

SEQ ID NO: 1912 - protein, 21 aa, Diguetia canities
GSGAGQEAGTGAGAAAAAAAA

SEQ ID NO: 1913 - protein, 25 aa, Diguetia canities
GAAGSGAGQGAGSGAGAAAAAAAAA

SEQ ID NO: 1914 - protein, 28 aa, Diguetia canities
SAAGAGQGAGSGSGAGAAAAAAAAAAAA

SEQ ID NO: 1915 - protein, 32 aa, Diguetia canities
GSGQGASFGISQQFGAPSGAASSAAAAAAAAA

SEQ ID NO: 1916 - protein, 51 aa, Dolomedes tenebrosus
GGAGQSGSGPYGASYLSSTTYTTSSQGAGGGVGGYGQGSGTGSAAAAAGAA

SEQ ID NO: 1917 - protein, 38 aa, Dolomedes tenebrosus
GAGQGGQGGYGQGAGQGGLGGYGQGGGAGAAAAAAAAA

SEQ ID NO: 1918 - protein, 33 aa, Dolomedes tenebrosus
GGAGSGQGGYGGQGGLGGYGQGAGAGAAAAAAA

SEQ ID NO: 1919 - protein, 34 aa, Dolomedes tenebrosus
GGAGAGQGGFGGQGGYGQGGGAGAAAAAAAAAAA

SEQ ID NO: 1920 - protein, 31 aa, Dolomedes tenebrosus
GGAGAGQGSYGGQGGYGQGGAGAATATAAAA

SEQ ID NO: 1921 - protein, 35 aa, Dolomedes tenebrosus
GGAGSGQGGYGGQGGLGGYGQGAGAGAAAAAAAAA

SEQ ID NO: 1922 - protein, 32 aa, Dolomedes tenebrosus
GGAGAGQGGYGGQGGQGGYGQGAGAGAAAAAA

SEQ ID NO: 1923 - protein, 31 aa, Dolomedes tenebrosus
GGAGAGQGGYGGQGGYGQGGGAGAAAAAAAA

SEQ ID NO: 1924 - protein, 37 aa, Dolomedes tenebrosus
SGGSGSGQGGYGGQGGLGGYGQGAGAGAGAAASAAAA

SEQ ID NO: 1925 - protein, 59 aa, Dolomedes tenebrosus
GAGSGQGGYGGQGGLGGYGQGAGAGAAAGASGSGSGGAGQGGLGGYGQGAGAGAAAAAA

SEQ ID NO: 1926 - protein, 51 aa, Dolomedes tenebrosus
GASGAGQGGFGPYGSSYQSSTSYSVTSQGAAGGLGGYGQGSGAGAAAAGAA

SEQ ID NO: 1927 - protein, 42 aa, Dolomedes tenebrosus
GQGGQGGYGQGAGAGAGAGAGQGGLGGYGQGAGSSAASAAAA

SEQ ID NO: 1928 - protein, 24 aa, Euprosthenops australis
GQGGPGGYGPAPNQGASSAAAAAA

SEQ ID NO: 1929 - protein, 41 aa, Euprosthenops australis
GSGQGPSGPYGTSYQISTQYTQTTTSQGQGYGSSSAGAAAA

SEQ ID NO: 1930 - protein, 39 aa, Euprosthenops australis
GAAGAGQGGYGGQGQGGYGQGAGGAAAAAAAAAAAAAAA

SEQ ID NO: 1931 - protein, 47 aa, Euprosthenops australis
GQGGQGGGGYGQGGQGGQGGQGQGGYGQGAGSSAAAAAAAAAAAAAA

SEQ ID NO: 1932 - protein, 18 aa, Euprosthenops australis
GRGQGGYGQGSGGAAAAA

SEQ ID NO: 1933 - protein, 21 aa, Euprosthenops australis
GSGQGGYGGRRQGGYGQAAAA

SEQ ID NO: 1934 - protein, 37 aa, Euprosthenops australis
GQGGQGGYGGLGQGGYGQGAGSSAAAAAAAAAAAAAA

SEQ ID NO: 1935 - protein, 26 aa, Euprosthenops australis
GRGQGGYGQGSGGNAAAAAAAAAAAA

SEQ ID NO: 1936 - protein, 38 aa, Euprosthenops australis
SGQGGQGGQGGQGQGGYGQGAGSSAAAAAAAAAAAAAA

SEQ ID NO: 1937 - protein, 27 aa, Euprosthenops australis
GQGQGRYGQGAGGNAAAAAAAAAAAAA

SEQ ID NO: 1938 - protein, 36 aa, Euprosthenops australis
GQGGQGGQGGLGQGGYGQGAGSSAAAAAASAAAAAA

SEQ ID NO: 1939 - protein, 28 aa, Euprosthenops australis
GRGQGGYGQGAGGNAAAAAAAAAAAAAA

SEQ ID NO: 1940 - protein, 36 aa, Euprosthenops australis
GQGGQGGYGGLGQGGYGQGAGSSAAAAAAAAAAAAA

SEQ ID NO: 1941 - protein, 32 aa, Euprosthenops australis
GGQGGQGQGRYGQGAGSSAAAAAAAAAAAAAA

SEQ ID NO: 1942 - protein, 27 aa, Euprosthenops australis
GQGQGGYGQGAGGNAAAAAAAAAAAAA

SEQ ID NO: 1943 - protein, 36 aa, Euprosthenops australis
GQGGQGGQGGLGQGGYGQGAGSSAAAAAAAAAAAAA

SEQ ID NO: 1944 - protein, 28 aa, Euprosthenops australis
GRGQGGYGQGAGGNAAAAAAAAAEAAAA

SEQ ID NO: 1945 - protein, 37 aa, Euprosthenops australis
SGQGSQGGQGGQGQGGYGQGAGSSAAAAAAAAAAAAA

SEQ ID NO: 1946 - protein, 29 aa, Euprosthenops australis
SGRGQGGYGQGAGGNAAAAAAAAAAAAAA

SEQ ID NO: 1947 - protein, 35 aa, Euprosthenops australis
GQGGQGGYGGLGQGGYGQGAGSSAAAAAAAAAAAA

SEQ ID NO: 1948 - protein, 32 aa, Euprosthenops australis
GGQGGQGQGGYGQGAGSSAAAAAAAAAAAAAA

SEQ ID NO: 1949 - protein, 37 aa, Euprosthenops australis
GQGGQGGQGGLGQGGYGQGAGSSAAAAAAAAAAAAAA

SEQ ID NO: 1950 - protein, 27 aa, Euprosthenops australis
GRGQGGYGQGVGGNAAAAAAAAAAAAA

SEQ ID NO: 1951 - protein, 33 aa, Euprosthenops australis
GGQGGQGQGGYGQGSGGSAAAAAAAAAAAAAAA

SEQ ID NO: 1952 - protein, 28 aa, Euprosthenops australis
GRGQGGYGQGSGGNAAAAAAAAAAAAAA

SEQ ID NO: 1953 - protein, 31 aa, Euprosthenops australis
GQGGQGGYGRQSQGAGSAAAAAAAAAAAAAA

SEQ ID NO: 1954 - protein, 29 aa, Euprosthenops australis
GSGQGGYGGQGQGGYGQSSASASAAASAA

SEQ ID NO: 1955 - protein, 32 aa, Euprosthenops australis
GGQGGFSGQGQGGFGPGAGSSAAAAAAAAAAA

SEQ ID NO: 1956 - protein, 31 aa, Euprosthenops australis
RQGGQGQGGFGQGAGGNAAAAAAAAAAAAAA

SEQ ID NO: 1957 - protein, 29 aa, Euprosthenops australis
QQGGQGGFSGRGQGGFGPGAGSSAAAAAA

SEQ ID NO: 1958 - protein, 32 aa, Euprosthenops australis
GQGGQGQGGFGQGAGGNAAAAAAAAAAAAAAA

SEQ ID NO: 1959 - protein, 32 aa, Euprosthenops australis
GQGGQGRGGFGQGAGGNAAAAAAAAAAAAAAA

SEQ ID NO: 1960 - protein, 29 aa, Euprosthenops australis
QQGGQGGFGGRGQGGFGPGAGSSAAAAAA

SEQ ID NO: 1961 - protein, 32 aa, Euprosthenops australis
GQGGQGRGGFGQGAGGNAAAASAAAAASAAAA

SEQ ID NO: 1962 - protein, 31 aa, Euprosthenops australis
GQGGQGRGGFGQGAGGNAAAAAAAAAAAAAA

SEQ ID NO: 1963 - protein, 34 aa, Euprosthenops australis
QQVGQFGFGGRGQGGFGPFAGSSAAAAAAASAAA

SEQ ID NO: 1964 - protein, 29 aa, Euprosthenops australis
GQGGQGQGGFGQGAGGNAAAAAAAAAAAA

SEQ ID NO: 1965 - protein, 32 aa, Euprosthenops australis
RQGGQGQGGFSQGAGGNAAAAAAAAAAAAAAA

SEQ ID NO: 1966 - protein, 34 aa, Euprosthenops australis
QQGGQGGFGGRGQGGFGPGAGSSAAAAAAATAAA

SEQ ID NO: 1967 - protein, 32 aa, Euprosthenops australis
GQGGQGRGGFGQGAGSNAAAAAAAAAAAAAAA

SEQ ID NO: 1968 - protein, 31 aa, Euprosthenops australis
GQGGQGQGGFGQGTVGNAAAAAAAAAAAAAA

SEQ ID NO: 1969 - protein, 31 aa, Euprosthenops australis
QQGGQGGFGGQGQRGFGQRAASAVASAASAA

SEQ ID NO: 1970 - protein, 34 aa, Euprosthenops australis
GQGGQGGYGGLGQGGYGQGAGSSAAAAAAAAAAA

SEQ ID NO: 1971 - protein, 39 aa, Euprosthenops australis
SGQGGQGGQGGQGQGGYGQGAGSSAAAAAAAAAAAAAAA

SEQ ID NO: 1972 - protein, 26 aa, Euprosthenops australis
GRGQGGYGQGAGGNAAAAAAAAAAAA

SEQ ID NO: 1973 - protein, 21 aa, Euprosthenops australis
GRGQGGYGQGSGGNAAAAAAA

SEQ ID NO: 1974 - protein, 29 aa, Euprosthenops australis
GQGGFGGQEGNGQGAGSAAAAAAAAAAAA

SEQ ID NO: 1975 - protein, 35 aa, Euprosthenops australis
GGSGQGRYGGRGQGGYGQGAGAAASAAAAAAAAAA

SEQ ID NO: 1976 - protein, 35 aa, Euprosthenops australis
GGSGQGGYGGRGQGGYGQGAGAAAAAAAAAAAAAA

SEQ ID NO: 1977 - protein, 30 aa, Euprosthenops australis
GQGGQGGFGSQGGNGQGAGSAAAAAAAAAA

SEQ ID NO: 1978 - protein, 35 aa, Euprosthenops australis
GESGQGGYGGRGQGGYGQGAGAAAAAAVAAAAAAA

SEQ ID NO: 1979 - protein, 42 aa, Gasteracantha mammosa
GGYRPVSGQQGPGQQGPGSGGQQGPGGQRPYGPGAAAAAAAA

SEQ ID NO: 1980 - protein, 43 aa, Gasteracantha mammosa
GGYGPGSGQGGPGQQGPGSGGQQGPGGQGPYGPGAAAAAAAAA

SEQ ID NO: 1981 - protein, 45 aa, Gasteracantha mammosa
GGYGPGSGQGGQQGPGSQGPGSGGQQGPGGQGPYGPSAAAAAAAV

SEQ ID NO: 1982 - protein, 43 aa, Gasteracantha mammosa
GGYGPGAGQQGPGQQGPGSGGQRGPGGQGPYGPGAAAAAAAAA

SEQ ID NO: 1983 - protein, 41 aa, Gasteracantha mammosa
GGYGPASGQQGPGQQGPGSGGQRGPGGQGPYGPGAAAAASA

SEQ ID NO: 1984 - protein, 35 aa, Hypochilus thorelli
GASGAGQGQGYGQQGQGGSSAAAAAAAAAAAAAAA

SEQ ID NO: 1985 - protein, 24 aa, Hypochilus thorelli
QGQGQGYGQQGQGSAAAAAAAAAA

SEQ ID NO: 1986 - protein, 28 aa, Hypochilus thorelli
GASGAGQGQGYGQQGQGSAAAAAAAAAA

SEQ ID NO: 1987 - protein, 36 aa, Hypochilus thorelli
GASGAGQGQGYGQQGQGGSSAAAAAAAAAAAAAAAA

SEQ ID NO: 1988 - protein, 21 aa, Hypochilus thorelli
QGQGYGQQGQGSAAAAAAAAA

SEQ ID NO: 1989 - protein, 31 aa, Hypochilus thorelli
GASGAGQGQGYGQQGQGGSSAAAAAAAAAAA

SEQ ID NO: 1990 - protein, 36 aa, Hypochilus thorelli
QGQGQGYGQQGQGYGQQGQGGSSAAAAAAAAAAAAA

SEQ ID NO: 1991 - protein, 23 aa, Hypochilus thorelli
QGQGQGYGQQGQGSAAAAAAAAA

SEQ ID NO: 1992 - protein, 25 aa, Hypochilus thorelli
QGQGYGQQGQGSAAAAAAAAAAAAA

SEQ ID NO: 1993 - protein, 132 aa, Hypochilus thorelli
GFGFGQSGSFAASSASSVSFAQALASSLVNSADFVSFCNSGVSPASIFPILRATAISLGYDETFASTVASAVAQSTATVGAGASASAYAQAWSTAIAGNLLSYGYLTGGNASAVASSFASALLFNVSSAAAA

SEQ ID NO: 1994 - protein, 133 aa, Hypochilus thorelli
GLASGQLGSFVTAGSSSVSFAQAFSSSLVNSADFVSFCNSGVSPASIFPILRATAISLGYDETFASTVASAVAQSTATVGAGASASAYAQAWSTAIAGNLLNYGYLTGGNASAIASSFASALLFNVSSAAASA

SEQ ID NO: 1995 - protein, 104 aa, Hypochilus thorelli
GASAAAISRARAAAASGASAGAATGASAGAASGASVAAASRARAAAASGGSAGAASGASAGAASGASAGAASGASAGAAGSASAGAASGASAAAASRARAAATS

SEQ ID NO: 1996 - protein, 32 aa, Hypochilus thorelli
VAGASAVSGASAGAASGASAAAASRARAAAAS

SEQ ID NO: 1997 - protein, 32 aa, Hypochilus thorelli
VAGAGAISGASAGAASGASAAAASRARTAAAS

SEQ ID NO: 1998 - protein, 182 aa, Kukulcania hibernalis; identical to SEQ ID NO: 1359

SEQ ID NO: 1999 - protein, 182 aa, Kukulcania hibernalis; identical to SEQ ID NO: 1360

SEQ ID NO: 2000 - protein, 188 aa, Kukulcania hibernalis
GEAFSASSASSAVVFESAGPGEEAGSSGGGASAAASAAAAAGAGSGRRGPGGARSRGGAGAGAGAGSGVGGYGSGSGAGAGAGAGAGAGGEGGFGEGQGYGAGAGAGAGAGAGFGSGAGAGAGAGSGAGAGEGVGSGAGAGAGAGFGVGAGAGAGAGAGFGSGAGAGSGAGAGYGAGRAGGRGRGGRG

SEQ ID NO: 2001 - protein, 365 aa, Megahexura fulva
GSYAYAQAAAGAFANVLFQAGVLTYANASALASAYASAYASSVASAAASASAGASASSGASASASAAAAAAAAAAASASAGASASAGASASAGASASASASATASAFASAFASAVVQTGYFSNVFGNVYSAAQASYYASASAQAAASAAGFGSSVANAVASASASAAGGVSVGAGAQAYASALGNGLGQALLANGVLNSGNYLQLANSLAYSFGSSLSQYSSSAAGASAAGAASGAAGAGAGAASSGGSSGSASSSTTTTTTTSTSAAAAAAAAAAAASAAASTSASASASASASASAFSQTFVQTVLQSAAFGSYFGGNLSLQSAQAAASAAAQAAAQQIGLGSYGYALANAVASAFASAGANA

SEQ ID NO: 2002 - protein, 364 aa, Megahexura fulva
GSYAYAQAAAGAFANVLFQAGVLTYANASALASAYASAYASSVASAAASASAGASASSGASASASAAAAAAAAAAASASAGASASAGASASAGASASASASATASAFASAFASAVVQTGYFSNVFGNVYSAAQASYYASASAQAAASAAGFGSSVANAVASASASAAGGVSVGAGAQAYASALGNGLGQALLANGVLNSGNYLQLANSLAYSFGSSLSQYSSSAAGASAAGAASGAAGAGAGAASSGGSSGSASSSTTTTTTTSTSAAAAAAAAAAASAAASTSASASASASASASAFSQTFVQTVLQSAAFGSYFGGNLSLQSAQAAASAAAQAAAQQIGLGSYGYALANAVASAFASAGANA

SEQ ID NO: 2003 - protein, 164 aa, Megahexura fulva
GSASSSTTTTTTTSTSAAAAAAAAAAASAAASTSASASASASASASAFSQTFVQTVLQSAAFGSYFGGNLSLQSAQAAASAAAQAAAQQIGLGSYGYALANAVASAFASAGANAGSYAYAQAAAGAFATVLFQAGVLTYANASALASAYASAYASSVASAAASA

SEQ ID NO: 2004 - protein, 194 aa, Megahexura fulva
SAGASASSGASASASAAAAAAAAAAASASAGASASAGASASASASATASAFASAFASAVVQTGYFSNVFGNVYSAAQASYYASASAQAAASAAGFGSSVANAVASASASAAGGVSVGAGAQAYASALGNGLGQALLANGVLNSGNYLQLANSLAYSFGSSLSQYSSSAAGASAAGAASGAAGAGAGAASSGGSS

SEQ ID NO: 2005 - protein, 164 aa, Megahexura fulva
GSSSSSTTTTTTTSASAAAAAAAAASAAASTSASASASASASASAFSQTFSQTVLQSASYGSYFGGSLSLQSAQAAASAAAQAAALQIGLGSYGNALASAVGSAVGSAGANAGAYGFTQAAASAVASVLLQAGVLNYGNATALASAYASAYASSVASAAASASA

SEQ ID NO: 2006 - protein, 36 aa, Nephila clavata
GAGAGGYGPGQQGPGGYGPSGPSGPGGASAAAAAAA

SEQ ID NO: 2007 - protein, 44 aa, Nephila clavata
GPGGYGPGQQGPGQQGPGQQGPAGYGPSGPSGPGGAAAAAAAAA

SEQ ID NO: 2008 - protein, 42 aa, Nephila clavata
GPGGYGLGQQGPGQQGPGQQGPAGYGPSGLSGPGGAAAAAAA

SEQ ID NO: 2009 - protein, 25 aa, Nephila clavata
GPGGYGPGQQRPSGPGGAAAAAAAA

SEQ ID NO: 2010 - protein, 23 aa, Nephila clavata
GPGGYGPSQRGPSGPGSAAAAAA

SEQ ID NO: 2011 - protein, 26 aa, Nephila clavata
GAGPGGYGPGQKGPSGPGSAAAAAAA

SEQ ID NO: 2012 - protein, 28 aa, Nephila clavata
GPGGYGPSQQGPARYGPSGPGSAAAAAA

SEQ ID NO: 2013 - protein, 41 aa, Nephila clavipes
GGAGQGGYGGLGGQGAGQGGYGGLGGQGAGQGAGAAAAAAA

SEQ ID NO: 2014 - protein, 30 aa, Nephila clavipes
GGAGQGGYGGLGSQGAGRGGQGAGAAAAAA

SEQ ID NO: 2015 - protein, 34 aa, Nephila clavipes
GGAGQGGYGGLGSQGAGRGGLGGQGAGAAAAAAA

SEQ ID NO: 2016 - protein, 28 aa, Nephila clavipes
GGAGQGGYGGLGNQGAGRGGQGAAAAAA

SEQ ID NO: 2017 - protein, 33 aa, Nephila clavipes
GGAGQGGYGGLGSQGAGRGGLGGQGAGAAAAAA

SEQ ID NO: 2018 - protein, 47 aa, Nephila clavipes
GGAGQGGYGGLGGQGAGQGGYGGLGSQGAGRGGLGGQGAGAAAAAAA

SEQ ID NO: 2019 - protein, 24 aa, Nephila clavipes
GGAGQGGLGGQGAGQGAGASAAAA

SEQ ID NO: 2020 - protein, 30 aa, Nephila clavipes
GGAGQGGYGGLGSQGAGRGGEGAGAAAAAA

SEQ ID NO: 2021 - protein, 44 aa, Nephila clavipes
GGAGQGGYGGLGGQGAGQGGYGGLGSQGAGRGGLGGQGAGAAAA

SEQ ID NO: 2022 - protein, 24 aa, Nephila clavipes
GGAGQGGLGGQGAGQGAGAAAAAA

SEQ ID NO: 2023 - protein, 34 aa, Nephila clavipes
GGAGQGGYGGLGSQGAGRGGLGGQGAGAVAAAAA

SEQ ID NO: 2024 - protein, 34 aa, Nephila clavipes
GGAGQRGYGGLGNQGAGRGGLGGQGAGAAAAAAA

SEQ ID NO: 2025 - protein, 27 aa, Nephila clavipes
GGAGQGGYGGLGNQGAGRGGQGAAAAA

SEQ ID NO: 2026 - protein, 31 aa, Nephila clavipes
GGAGQGGYGGLGSQGAGRGGQGAGAAAAAAV

SEQ ID NO: 2027 - protein, 42 aa, Nephila clavipes
GAGQEGIRGQGAGQGGYGGLGSQGSGRGGLGGQGAGAAAAAA

SEQ ID NO: 2028 - protein, 27 aa, Nephila clavipes
GGAGQGGLGGQGAGQGAGAAAAAAGGV

SEQ ID NO: 2029 - protein, 27 aa, Nephila clavipes
RQGGYGGLGSQGAGRGGQGAGAAAAAA

SEQ ID NO: 2030 - protein, 31 aa, Nephila clavipes
GGAGQGGYGGLGGQGVGRGGLGGQGAGAAAA

SEQ ID NO: 2031 - protein, 22 aa, Nephila clavipes
GGAGQGGYGGVGSGASAASAAA

SEQ ID NO: 2032 - protein, 24 aa, Nephila clavipes
GGYGQGPSGYGPGASASSAAAAAA

SEQ ID NO: 2033 - protein, 22 aa, Nephila clavipes
PSGYGPSQQGPSGSAAAAAAAA

SEQ ID NO: 2034 - protein, 21 aa, Nephila clavipes
PSGYGPRQQAPSGPAAAAAAA

SEQ ID NO: 2035 - protein, 28 aa, Nephila clavipes
GAGGYGPAQRGPSVYGPSGPGAAAAAAA

SEQ ID NO: 2036 - protein, 43 aa, Nephila clavipes
GPGGYGPGQQGPGGYGPGQQGPGRYGPGQQGPSGPGSAAAAAA

SEQ ID NO: 2037 - protein, 42 aa, Nephila clavipes
GSGQQGPGGYGPRQQGPGGYGQGQQGPSGPGSAAAASAAASA

SEQ ID NO: 2038 - protein, 50 aa, Nephila clavipes
ESGQQGPGGYGPGQQGPGGYGPGQQGPGGYGPGQQGPSGPGSAAAAAAAA

SEQ ID NO: 2039 - protein, 41 aa, Nephila clavipes
SGPGQQGPGGYGPGQQGPGGYGPGQQGPSGPGSAAAAAAAA

SEQ ID NO: 2040 - protein, 40 aa, Nephila clavipes
SGPGQQGPGGYGPGQQGPGGYGPGQQGLSGPGSAAAAAAA

SEQ ID NO: 2041 - protein, 31 aa, Nephila clavipes
GPGQQGPGGYGPGQQGPSGPGSAAAAAAAAA

SEQ ID NO: 2042 - protein, 34 aa, Nephila clavipes
GPGGYGPGQQGPGGYGPGQQGPSGAGSAAAAAAA

SEQ ID NO: 2043 - protein, 42 aa, Nephila clavipes
GPGQQGLGGYGPGQQGPGGYGPGQQGPGGYGPGSASAAAAAA

SEQ ID NO: 2044 - protein, 32 aa, Nephila clavipes
GPGQQGPGGYGPGQQGPSGPGSASAAAAAAAA

SEQ ID NO: 2045 - protein, 37 aa, Nephila clavipes
GPGGYGPGQQGPGGYAPGQQGPSGPGSASAAAAAAAA

SEQ ID NO: 2046 - protein, 36 aa, Nephila clavipes
GPGGYGPGQQGPGGYAPGQQGPSGPGSAAAAAAAAA

SEQ ID NO: 2047 - protein, 21 aa, Nephila madagascariensis
GRGPEGYGPRQQGPGATAAAA

SEQ ID NO: 2048 - protein, 30 aa, Nephila madagascariensis
GPGGYGPRQQGPGGYGPGQQGPGAAAAAAA

SEQ ID NO: 2049 - protein, 24 aa, Nephila madagascariensis
GRGPGGYGPGQQGPGGPGAAAAAA

SEQ ID NO: 2050 - protein, 20 aa, Nephila madagascariensis
GSEGYGPGQQGPRGPGAAAA

SEQ ID NO: 2051 - protein, 20 aa, Nephila madagascariensis
GPGGYGPGQQGASAAASAAA

SEQ ID NO: 2052 - protein, 22 aa, Nephila madagascariensis
GRGPGGYGPGQQGPGGPSAAAA

SEQ ID NO: 2053 - protein, 20 aa, Nephila madagascariensis
GPGGYGPGQQGPSAAAAAAA

SEQ ID NO: 2054 - protein, 24 aa, Nephila madagascariensis
GSGPGGYGPGQQGPGGPGAAAAAA

SEQ ID NO: 2055 - protein, 27 aa, Nephila madagascariensis
GPGGYGPGQQGPGAAAAAAGQAAAAAA

SEQ ID NO: 2056 - protein, 28 aa, Nephila madagascariensis
GPGGYGPGGYGPGQQGPGGPGAAAAAAA

SEQ ID NO: 2057 - protein, 29 aa, Nephila madagascariensis
GRGPGGYGPGQQGPGQQGPGGSGAAAAAA

SEQ ID NO: 2058 - protein, 21 aa, Nephila madagascariensis
GPGGYGPGQQGPGAAAAAAAA

SEQ ID NO: 2059 - protein, 25 aa, Nephila madagascariensis
GRGPGGYGPGQQGPGGPGAAAAAAA

SEQ ID NO: 2060 - protein, 24 aa, Nephila madagascariensis
GRGPGGYGPGQQGPGGSGAAAAAA

SEQ ID NO: 2061 - protein, 20 aa, Nephila madagascariensis
GPGGYGPGQQGTGAAAAAAA

SEQ ID NO: 2062 - protein, 24 aa, Nephila madagascariensis
GSGAGGYGPGQQGPGGPGAAAAAA

SEQ ID NO: 2063 - protein, 20 aa, Nephila madagascariensis
GPGGYGPGQQGPGAAAAAAA

SEQ ID NO: 2064 - protein, 24 aa, Nephila madagascariensis
GSGPGGYGPGQQGPGGSSAAAAAA

SEQ ID NO: 2065 - protein, 18 aa, Nephila madagascariensis
GPGRYGPGQQGPGAAAAA

SEQ ID NO: 2066 - protein, 26 aa, Nephila madagascariensis
SAGRGPGGYGPGQQGPGGPGAAAAAA

SEQ ID NO: 2067 - protein, 25 aa, Nephila madagascariensis
GSGPGGYGPGQQGPGGPGAAAAAAA

SEQ ID NO: 2068 - protein, 24 aa, Nephila madagascariensis
GRGPGGYGQGQQGPGGPGAAAAAA

SEQ ID NO: 2069 - protein, 26 aa, Nephila madagascariensis
GSGPGGYGPGQQGPGRSGAAAAAAAA

SEQ ID NO: 2070 - protein, 18 aa, Nephila madagascariensis
GPGGYGPGQQGPGAAAAA

SEQ ID NO: 2071 - protein, 26 aa, Nephila madagascariensis
SAGRGPGGYGPGQQGPGGSGAAAAAA

SEQ ID NO: 2072 - protein, 27 aa, Nephila madagascariensis
GPGGYGPGQQRPGQQGPGGPGAAAAAA

SEQ ID NO: 2073 - protein, 29 aa, Nephila madagascariensis
GRGPGGYGPGQQGPGQQGPGGPGAAAAAA

SEQ ID NO: 2074 - protein, 20 aa, Nephila madagascariensis
GPGRYGPGQQGPGAAAAAAA

SEQ ID NO: 2075 - protein, 26 aa, Nephila madagascariensis
GSGPGGYGPGQQGPGGPGAAAAAAAA

SEQ ID NO: 2076 - protein, 20 aa, Nephila madagascariensis
GPGGYGPGQQGPGAAAAASA

SEQ ID NO: 2077 - protein, 24 aa, Nephila madagascariensis
GTGPGGYGPGQQGPGGSGAAAAAA

SEQ ID NO: 2078 - protein, 23 aa, Nephila madagascariensis
GRGPGGYGPGQQGPGGSGAAAAA

SEQ ID NO: 2079 - protein, 29 aa, Nephila madagascariensis
SGRGPGGSGPGGYGPGQQGPGAAAAAAAA

SEQ ID NO: 2080 - protein, 19 aa, Nephila madagascariensis
GPGGYGPGQQGPGAAAAAA

SEQ ID NO: 2081 - protein, 24 aa, Nephila madagascariensis
PSGYVPSQTGQSGLGAAAAAAAVA

SEQ ID NO: 2082 - protein, 22 aa, Nephila madagascariensis
PSGYGPSQQGPSGPGAATAAAA

SEQ ID NO: 2083 - protein, 21 aa, Nephila madagascariensis
GSYGQGPSGYAQGSSAASAAA

SEQ ID NO: 2084 - protein, 24 aa, Nephila madagascariensis
GRGPGGYGPGQQGPGGSGAAAAAS

SEQ ID NO: 2085 - protein, 42 aa, Nephila madagascariensis
GPGQQGPGGYGPGQQGPGGYGPGQQGPSGPGSAAAAAAAAAA

SEQ ID NO: 2086 - protein, 50 aa, Nephila madagascariensis
GPGQQGPGGYGPGPQGPGGYGPGQQGPSGYGPGQQGPSGPGSAASAAAAA

SEQ ID NO: 2087 - protein, 39 aa, Nephila madagascariensis
GSGQQGPGGYGPGQQGPGGYGPGQQGPSGPGSAAAAAAA

SEQ ID NO: 2088 - protein, 40 aa, Nephila madagascariensis
GPGQQGPGGYGPGQQGPGGYGPGQQGPSGPGSAAAAAAAA

SEQ ID NO: 2089 - protein, 39 aa, Nephila madagascariensis
GPGQQGPGGYGPGQQGPGGYGPGQQGPSGPGSAAAAAAA

SEQ ID NO: 2090 - protein, 41 aa, Nephila madagascariensis
GPGQQGPGGYGPGQQGPGGYGPGQQGPSGPGSAAAAAAAAA

SEQ ID NO: 2091 - protein, 34 aa, Nephila madagascariensis
GPGQQGPGGYGPGQQGPGQQGPSGPGSAAAAAAA

SEQ ID NO: 2092 - protein, 35 aa, Nephila madagascariensis
GPGPQGPGGYGPGQQGPGGYGPSGPGSAAAAAAAA

SEQ ID NO: 2093 - protein, 39 aa, Nephila madagascariensis
GPGQQGPGGYGPGQQRPSGYGPGQQGPSGPGSAAAAAAA

SEQ ID NO: 2094 - protein, 22 aa, Nephila madagascariensis
GPGQQGPGAYGPSGPGSAAAAA

SEQ ID NO: 2095 - protein, 24 aa, Nephila madagascariensis
GLGGYGPAQQGPSGAGSAAAAAAA

SEQ ID NO: 2096 - protein, 34 aa, Nephila madagascariensis
GGAGQGGYGGLGSQGAGRGGYGGQGAGAAAAAAA

SEQ ID NO: 2097 - protein, 39 aa, Nephila madagascariensis
GGAGQGGYGGLGSQGAGQGGYGGLGGQGAGQGAAAAAAA

SEQ ID NO: 2098 - protein, 32 aa, Nephila madagascariensis
GGAGQGGYGGLGSQGAGRGGYGGQGAGAAAAA

SEQ ID NO: 2099 - protein, 44 aa, Nephila pilipes
GGAGQGGYGGLGGQGSGAAASGAGQGGYGGLGGQGAGAAAAAAA

SEQ ID NO: 2100 - protein, 43 aa, Nephila pilipes
GGAGQGGYGGLGGQGAGAAGAGAGQGGYGGLSGQGAGAAAAAA

SEQ ID NO: 2101 - protein, 46 aa, Nephila pilipes
GGAGQGGYGGLGGQGSGAAAAGTGQGGYGSLGGQGAGAAGAAAAAV

SEQ ID NO: 2102 - protein, 47 aa, Nephila pilipes
GGAGQGGYSGLDRQRSGAAAAGASVAAQGGYGGLGGQGAGAAGAAAA

SEQ ID NO: 2103 - protein, 48 aa, Nephila pilipes
GGAGRGGYGGLVGQGAGAAAAGAGEAGQGGYGSLGGQGTGAGGEAAAA

SEQ ID NO: 2104 - protein, 27 aa, Nephila pilipes
GGAGQGGYSGLDRQRSGAAAAGASVAA

SEQ ID NO: 2105 - protein, 20 aa, Nephila pilipes
QGGYGGLGGQGAGAAGAATA

SEQ ID NO: 2106 - protein, 21 aa, Nephila pilipes
GGAGRGGYGGLVGQGAGAAAA

SEQ ID NO: 2107 - protein, 27 aa, Nephila pilipes
GAGEAGQGGYGSLGGQGTGAGGEAAAA

SEQ ID NO: 2108 - protein, 23 aa, Nephila senegalensis
GGAGQGGYGGLGGQGAGAAAAAA

SEQ ID NO: 2109 - protein, 18 aa, Nephila senegalensis
GGAGQGGQGLGGRGAAAA

SEQ ID NO: 2110 - protein, 27 aa, Nephila senegalensis
GGAGQGGYGGLGGQGAGRGAGAAAAAA

SEQ ID NO: 2111 - protein, 25 aa, Nephila senegalensis
GGAGQGGYGGLGGQGAGAAAAAAAA

SEQ ID NO: 2112 - protein, 22 aa, Nephilengys cruentata
GGAGQGGYGGQGAGQGAAAAAA

SEQ ID NO: 2113 - protein, 24 aa, Nephilengys cruentata
SGAGQGGYEGPGAGQGAGAAAAAA

SEQ ID NO: 2114 - protein, 27 aa, Nephilengys cruentata
GGAGQGGYGGLGGQGAGQGAGAAAAAA

SEQ ID NO: 2115 - protein, 32 aa, Nephilengys cruentata
GGAGQGGYGGLGSGQGGYGRQGAGAAAAAAAA

SEQ ID NO: 2116 - protein, 24 aa, Nephilengys cruentata
SGAGQGGYGGPGAGQGAGAAAAAA

SEQ ID NO: 2117 - protein, 29 aa, Nephilengys cruentata
GGAGQGGYGGLGSGQGGYGGQGAGAAAAA

SEQ ID NO: 2118 - protein, 22 aa, Nephilengys cruentata
GGSGRGGYGSQGAGQGAAAAAA

SEQ ID NO: 2119 - protein, 22 aa, Nephilengys cruentata
GGAGQGGYGGAGSGAAAASAAA

SEQ ID NO: 2120 - protein, 37 aa, Parawixia bistriata
GGYGPGGAGQQGPGAGQQGPGSQGQSGPGATVAAAAA

SEQ ID NO: 2121 - protein, 37 aa, Parawixia bistriata
GGYGPGGAGQQGPGAGQQGQGSQGPYGPAATAAAAAA

SEQ ID NO: 2122 - protein, 36 aa, Parawixia bistriata
GGYGPGSGQQGPGAGQQGPGGQGPYGPSAAAAAAAA

SEQ ID NO: 2123 - protein, 36 aa, Parawixia bistriata
GGYGPGSGQQGPGAGPQGPGSQGPYGPGAAAAAAAV

SEQ ID NO: 2124 - protein, 36 aa, Parawixia bistriata
GGYGPGSGQQGPGAGQQGPGGQGPYGPSSAAAAAAA

SEQ ID NO: 2125 - protein, 37 aa, Parawixia bistriata
GGYGPGGAGQQVPGAGQQGPGNQGPSGPGAAAAAAAA

SEQ ID NO: 2126 - protein, 37 aa, Parawixia bistriata
GGYGPGGAGQQGPAAGQQGPGSQGSYGPGAAAAAAAA

SEQ ID NO: 2127 - protein, 36 aa, Parawixia bistriata
GGYGPGSGQQGPGGAGQQGPGGQGPYGPGSSSAAAV

SEQ ID NO: 2128 - protein, 30 aa, Parawixia bistriata
GGYGPSSGLQGPAGQGPYGPGAAASAAAAA

SEQ ID NO: 2129 - protein, 39 aa, Parawixia bistriata
GGLGGQGGLGGLGSQGAGLGGYGQGGAGQGGAAAAAAAA

SEQ ID NO: 2130 - protein, 39 aa, Parawixia bistriata
GGLGGQGGRGGLGSQGAGQGGYGQGGAGQGGAAAAAAAA

SEQ ID NO: 2131 - protein, 37 aa, Parawixia bistriata
GGLGGQGGLGALGSQGAGQGGAGQGGYGQGGAAAAAA

SEQ ID NO: 2132 - protein, 39 aa, Parawixia bistriata
GGLGGQGGLGGLGSQGAGQGGYGQGGAGQGGAAAAAAAA

SEQ ID NO: 2133 - protein, 39 aa, Parawixia bistriata
GGLGGQGGLGGLGSQGAGPGGYGQGGAGQGGAAAAAAAA

SEQ ID NO: 2134 - protein, 38 aa, Parawixia bistriata
GGLGGQGGLGALGSQGAGQGGYGQGGAGQGGAAAAAAA

SEQ ID NO: 2135 - protein, 47 aa, Parawixia bistriata
GGLGGQGGLGALGSQGAGQGGYGQGGSQGAGQGGYGQGGAAAAAAAA

SEQ ID NO: 2136 - protein, 42 aa, Parawixia bistriata
GGLGGQGGLGGLGSQGAGQGGYGQGGSQGAGQGGAAAAAAAA

SEQ ID NO: 2137 - protein, 39 aa, Parawixia bistriata
GGLGGQGGFGGLGSQGAGQGGYGQGGAGQGGAAAAAAAA

SEQ ID NO: 2138 - protein, 41 aa, Parawixia bistriata
GVLGGQGGLGGLGSQGAGQGGYGQGGAGQGGAAAAAAAAAA

SEQ ID NO: 2139 - protein, 39 aa, Parawixia bistriata
GGLGGQGGRGGLGSQGAGQGGYGQGGAGASSAAAASAAA

SEQ ID NO: 2140 - protein, 32 aa, Peucetia viridans
GAGAGQGGRGGYGQGGFGGQGSGAGAGASAAA

SEQ ID NO: 2141 - protein, 34 aa, Peucetia viridans
GAGAGQGGRGGYGQGGFGGQGSGAGAGASAAAAA

SEQ ID NO: 2142 - protein, 34 aa, Peucetia viridans
GAGQGGRGGYGQGGLGGSGSGAGAGAGAAAAAAA

SEQ ID NO: 2143 - protein, 41 aa, Peucetia viridans
GAGGYGQGGLGGYGQGAGAGQGGLGGYGSGAGAGASAAAAA

SEQ ID NO: 2144 - protein, 41 aa, Peucetia viridans
GAGGAGQGGLGGYGQGAGAGQGGLGGYGSGAGAGAAAAAAA

SEQ ID NO: 2145 - protein, 27 aa, Peucetia viridans
GAGGSGQGGLGGYGSGGGAGGASAAAA

SEQ ID NO: 2146 - protein, 166 aa, Poecilotheria regalis; identical to SEQ ID NO: 1389

SEQ ID NO: 2147 - protein, 166 aa, Poecilotheria regalis; identical to SEQ ID NO: 1390

SEQ ID NO: 2148 - protein, 166 aa, Poecilotheria regalis; identical to SEQ ID NO: 1391

SEQ ID NO: 2149 - protein, 42 aa, Tetragnatha kauaiensis
GGLGGGQGAGQGGQQGAGQGGYGSGLGGAGQGASAAAAAAAA

SEQ ID NO: 2150 - protein, 42 aa, Tetragnatha kauaiensis; identical to SEQ ID NO: 2149

SEQ ID NO: 2151 - protein, 45 aa, Tetragnatha kauaiensis
GGLGGGQGAGQGGQQGAGQGGYGSGLGGAGQGAGQGASAAAAAAA

SEQ ID NO: 2152 - protein, 36 aa, Uloborus diversus
GGSGGQGGQGGYGSGGQGQGQGGYGAGAAAAAAAAA

SEQ ID NO: 2153 - protein, 36 aa, Uloborus diversus
GGSGGQGGAGAGGQGGQGQGQGGYGSGAAAAAAAAA

SEQ ID NO: 2154 - protein, 33 aa, Uloborus diversus
GGLGGQGGYGSGRQGQGQGGYGSGAAAAAAAAA

SEQ ID NO: 2155 - protein, 36 aa, Uloborus diversus
GGSGGQGAQGGYGSGGQGQGQGGYGSGAAAAAAAAA

SEQ ID NO: 2156 - protein, 35 aa, Uloborus diversus
GGSGGQGGQGGYGSGGQGQGQGGYGSGAASAAAAA

SEQ ID NO: 2157 - DNA, 1380 bp, synthetic construct
  misc_feature 1..1380: note = Description of Artificial Sequence: Synthetic polynucleotide
  source 1..1380: mol_type = other DNA
ggtttgcagccctccgccggatatcagcctggagcaggttatcagccgggaactggcttgcaaccgggagctggataccaacctggagctggacttcaaccgggtgcaggagtacaaccaggagctggagttcagccaggagccggacttccaccatcagctggattgcagcctggcgcaggtctacagccgggagccggcttacagcctggaacgggataccaaccaggtgctggttatcaacctggagccggcttgcagcctggagccggacttcagcctggagctggactccaacctggcgctggattacaacctggtgcaggataccaccctggagcaggtttgcaacctggtatcggaccacaaccaggagccggcttgcagtccggagcaggactacaaccaggtagcggtttgcaaccaggagctggttatcaaccaggacccggtctgcagccaggtgcaggatatcagccttctgctggtatccgtccagacatgggactccaaccaggtgctggatacaagccaggttcaggctatcaacctggaagttcgtaccaacctggtgctggattgcatccaggtattcagcagggaactggactacatccaggtacaggtttgcaacctagagtaggcttacagccaggcgctggtgtgcaacccggtgctgaataccagcctggttccggttatcaacctgatgctagtttgcatcctggtgctggtctacaacctggaggaagattgcaaccatctgccggtctacagcctggtactggattgcaaccaggagtcggagtacaaccaggtgcagaatatcagccaggatccggatatcaaccaggagctggcttgcagccaggagcaggtttattgcctggtggtagattacagccgggtgcaggacttcaacctggtacaggtttacagccaggtgctggatatcaaccaggttctatctaccaacctggtgcaggatatcaacctggtgccggactccaaccgggagctggtgtgcaaccaggaaccggttatagaccaggagcaggattacagcctggtggacgcttgcaaccatctgctggattgcagccaggtgccggacttcagccaggtgcgggtgttcagccaggcgctgaataccagccgggatctggataccaacctggtgcgggactacagccaggaactggaatccagcccggtgcaggtctgcaacctggtgtaggccttcaacctggtgccggtttacaaccaggagctgtcctccaacctggaacaggatatcagccaggagcaggctatcagccaggtactggattgcaggctggagctggattgcaacctggagctggtttgcaaccaggatca

SEQ ID NO: 2158 - DNA, 1086 bp, synthetic construct
  misc_feature 1..1086: note = Description of Artificial Sequence: Synthetic polynucleotide
  source 1..1086: mol_type = other DNA
ggttcacctttagaggagaagtacgacgagaagtccgaagctgatgactaccaatcagaagattcatctgctgccattcacgaccagacaaccaaaatcgccactaatgccgtgaaaacttacgctaataaggccaaggctaccgagtcaaaggctaagttgtatcatcaatactctaaggatcgtgcctattatagcagagaatacgagaagatgggagaagaatatatgaagaagtccaaggagtatgaacagctttatatagccgaggctgctaggatcagcttgcacgagaataaacaaaaagagtgggacacgaaaggtagagaggcaaatgttggaataagagagtacgaaactaagtcccaacaggcttcttcgaagaaaaatgagctattggaagagagcattatcgctgctgttcaggctgcaatccatgaaacgcaggcaacaggatatctgctaaaatcagaggctgcaaacggtattgctaggaacatgttgcaaattgcagagtctattagggacgaggcctctaatcactaccaaattggtaaagaagagttgaatagagcaaccgctcagaaggtaaaagctcaacaacaggccgaggattctcagcgccaccatgctgctgcgagagcttatcaacaggactctctaagatctagaatggcctccagagccaataatatgcagtatatgcagaattcattattggcagaaagagcacactcgctttctacggagaacactttggaatcagaattgtatggaaaggaggctgacgaattggctaaaatgtcggaagagtccgccgctatctcgaaaatttgttcaggagaggaaagatcctacagaaacatggctaagcagtcagaagtgaaagcttacgaatattccgtatcgaagaatatgatgggtgcagatatgaccgataccgctgcaatggctaatggcgacgaagctaagcaaggtgacgacgaggagcagcaaatgtataggtcacctaacatccctgccgaggatagtaccaagaacctttcctataacttaaaggattctactgagggtgaaggtatgtca

SEQ ID NO: 2159 - DNA, 1053 bp, synthetic construct
  misc_feature 1..1053: note = Description of Artificial Sequence: Synthetic polynucleotide
  source 1..1053: mol_type = other DNA
ggtaaaaaacatgaagccttaaccttcggttctggctacaagtcaacttacggcgaaggtgaaacattcgacgacgaggatgaccaagctttacgtaatgagagagtgccagtaggagctttatctgcagctatcataaacccttacgctctacacagtgaagaaggaagaatagcttacgatacgtcgagccaatactacgcaaataaggccgagggttcggcagacctttcccgcgaaaaaaagcagatgcatggtgaatatcatggtaaagctgccacatacgcgtccagggcgaacgaggcttataagaagtcccagttgcataagcgtcaagccaaagacaaacaggctattgccaaggagtatgaggagcgggctcagaaacatgaatcgaggtcaaaggctctcgatgtacgtgaccaagatgacgagcgtaaatcagtcactgaaatggaggaatacgctagagctctaaagatcgctaatcttgcccttgtctttgctggtatttaccaggagactggtcgattacaattggaggccaccaatgtttttgagcagtttcataaaatgctgtccacaaaaggcgaagagtataaaaaacaagcagaggaatacaaggaaaaggccaataaggagaaggaggaagctgccatccagcaagcaaaaagtaaagaattgaatgctaaagcacaagaatatgaaaatatttttatagagtcctctaagaagctggctgctaatcgttattacgagcttgaattcaaaatgaaagccgagaacgaaaggcatcacgctgaattggcacgtattagatctaggtttttgagtaggctagcaaactataatagagagcaagcagaagctgtcctcagatttgctcgatcagaaagaaaagacggagaaatttttaggcgcaatgcaatcgaactctataaagagactagagccctagctgctacagccgcaagagttatgaagcaacaccgttatacgggtcaagaaatatacacgaaacaaccttttcctcattctaactatcacggagca

SEQ ID NO: 2160 - DNA, 1092 bp, synthetic construct
  misc_feature 1..1092: note = Description of Artificial Sequence: Synthetic polynucleotide
  source 1..1092: mol_type = other DNA
ggttcacctctggaggaaaaatatggtgagaaatatggagatatggaggagtatcagagaggtacggaagattcaagagccgttattaacgaccatactgccaaggtggcctcccaatctgcacgaggaatggttaacaaggctaaaaccacagaagccgctgctagatctaacgagcaactttctaaagatcgtcagtactactaccgtgagtatttgaagaaagccgattaccataagaaaaaggctttggagtacgaacaattgtcagcagccgaaaacgccaaaatcgcctaccacgagagtaagcagaaagattgggagacaaaagccagagagtctgatgtccagtgtagagatgctgaagccaagtatgaacaaagttatactagatctcgtgaattgaagagagagtctattatagcgtatgttcaagcagctatgcatcatgccgaggcgtctggtgaccatatgaaagcggacagagctaaggacattgccagagatatgatgaggaaagccgagtccttaaggggtgatgctagtaaccattaccagagaagcgaggaggataagaacaaggcaaggtctgagaaggtcaaagctcaccaaaacgcagataattcccaacgccaccacactgcttgtagggcctatgaccaggagggattgaaaactcgtctttcctctaaggctaacatgatgagacaaatccattcatctttactcgcggaacgaagccactctttggctagagaggacggtctagccgctgatttgtcacacaaactagccgaagagcttgctagaatgtctgaggagtctggtgcgatttcaaaaattaattcgggagaagaaagaggttattccaataaggtgaggcaagatgaagttaaagcacacgaactcgctgttagcaagagaatgatgggtgcagaggtggccgataattctgagatgatttccctggcacaagcaaaagatggttccttggatgagggtgagaattataagctctctactttctatgcagacgatagcaccaaaaacatgttgcccgattcaaggggacaaatgagctatggtgatgaa

SEQ ID NO: 2161 - DNA, 1044 bp, synthetic construct
  misc_feature 1..1044: note = Description of Artificial Sequence: Synthetic polynucleotide
  source 1..1044: mol_type = other DNA
ggtaagaaccatgaagtcatgacctatggctccggatataaaactatgggtgatgagggaggatcgggtgttggcaacgaaggtgaggactatcaagacaacgaaggagccactgcagctactattttggacgagtctacccatcataccgaagaggctcgcgacattttcggtacacgttcagaagcccatgcctacagtgcggagatgtttgctgacttagttagagaaaagagacaagctagtatcgaaagccacaagaaggcggaggactacgccgtcagagctaatgaagagtccaagaagagtcaacttttaaagagacaggcgagagataagcaagccatagctaagcagtatgaagagaaggctcagaagtacgacagaatcagtaagcaacaagacattaaagaacaggatgattacagaaagtccgacgccgagagtgaggagtataagcgttccattgctgtcgctaacgctgctctggctctagcgtccgcttacgaagaggcatctcgtatggagcttgacgccactggtgagatggaacaacaatccaaggagctttataccaaaagtgaagaatataataaggttgcggaagaatgcattacccgtgccaaaaaagaaaaagaactagcgagaatagaagaagcaaagggtaaagaagcagaggctaaaagtcaagaatacgaaaacttcgcgactgacaacaacaagaaatataacgcaatgaagttttatggttgggagttcaagatgaaagctgagaacgaaaggcacaacgctgattactgtagaattaaaagtagatacttggcccagttatccaattataacagagagcaggccgaggcgctttaccacttcgctgctgcccagagaaaggatgccgaattgtttcatcgatacgctatggagttgtataaacagaccagagtgcttactgctagcgctgcccaaattatgaagcaacatcgttacactggccaagaaatctactctaagcagcctttccctcattcgaactaccacggagca

SEQ ID NO: 2162 - DNA, 1098 bp, synthetic construct
  misc_feature 1..1098: note = Description of Artificial Sequence: Synthetic polynucleotide
  source 1..1098: mol_type = other DNA
ggttcgcctctagaggacaaatatgatcagaaatatgaagttgaagattacagaggtggtagcgaagataccaaagctgctatcaacgataatgcagccagagtcgcttcacattccgctaagtcacacgtcaataaggccttagtggtagaagctgctgctagactaaatgctcagattgccaaggaccgtaactactatgctagagagtacacaaagttggccgaagagtctaagaagagagccagacaatatggtcagctggccgacatggaggcaggtaggattggacaacacgaacatatgcagcaagaatggaattcgaaggcaagagagtccgaagctcaatgcaaagcgaccgaagccaaagctcaggaggaatacaccaaagccagagatgagcgtcagaaatcgttggtttctaacgctgaggctgccatgcatgatgctcaagccactgttgacactatgaagtccgaaagggcttatgagattggaaaagagttaatgcgcaaagctgagaacgctagaaacgatgcttccaaccactatcagcgagctaaggagaatagagaaagagctaatagtgaaaccgttaaatcacaccaacaagctcaagacgcccagagacacaacgccgcttccaaggcctaccagcaagatggcctccgaacaagaatggcctctagaattaacattatgaagtacattcagtccagcttgttggctgaaagggctgccaaccaagctagaatagagcaactcaagtctgaatggtacgagaaggcagctaacgagtactccaggatgtctgaagaaaatgccgctatttccaaacttgcaggttctgaggaacactacttcgctcaaagagcgaaaagaaacgagggcaaggcttatgaattgtctcagtcaaagagaatgatgggttccgaggctgccgctgccggagaactgctggctatgtcacaggccaaggatgacgagactgaagatgagaagcatttcgactttccaatttacgagtctgacgatccaactaaactgtcgccatctccggacgaaaaagatttgacatacggttctggtgagggccta

SEQ ID NO: 2163 - DNA, 1026 bp, synthetic construct
  misc_feature 1..1026: note = Description of Artificial Sequence: Synthetic polynucleotide
  source 1..1026: mol_type = other DNA
ggtaagaagcacgaagtcatgacttacggttcaggatataaacacatgggtggagaaacttatgaggacgttggaactggaaacagactaggctctactgctttcgacatcatggaagccgctgacgaaaacaccgagcgagcgtcccatactttcggttcaaaatctgccgcatactcgtccgacgctgacttatttattgagctcctccgggaaaagcgtgagacgagagcaaaccatggtaaacgtgctgaatcacaggcagttttagctaacgagtcgtaccagaagtcccaattgcataaaagacaggccaaagataaacaagccatttctaaagagtatgaggagagagctcaaaaacacgatagactttctaaggagcaggacatgaaggaacatgatgactatagaaagtctaatgcagaggacactgaattgaggaatagtgttgaacgttcaaactatgaccatgtgatggctttaggttatcacgaacttagtcaactcgaaatgggtgaaactaatcaatgtgaacaattgtccagagagctacaatccagagctgaagagtatttcaacctggccaaagaattgaaagagaaagccaagaaggaaaaggaaaatgcccgaattaaaaaggcaaaagccaaggaagaagaagccagagcagaagaatacgaaaatgcctttactgaaaatagcaagaaggtattagcatacaagttttatgagctggagttcggtatgaaggctctaaatgaacatcatcaggctgaatcagcacgtgtccgccatcactttttacagattttagagcaacacaatagtcaacatgcagacatgctttggggatacgcacaacaggaagataaagacggtagatcttttactcagtacgcgaccgagctctcaaagcagaccaaaatgctcaccgctaccgctgctcacctgatgaaacaacaccgctatacgggtatggagatgtattcgaagcaaccgttccctcactctaactaccatgga

SEQ ID NO: 2164 - DNA, 750 bp, synthetic construct
  misc_feature 1..750: note = Description of Artificial Sequence: Synthetic polynucleotide
  source 1..750: mol_type = other DNA
ggtcctagaggttggtatggccctagaggattgggcccccgcggtctgggaccattaggattggattcagacatcattggagatggttacggtccgtatggtttgggatctcgtggattgggaccattgggacttgattctgacataatcggtgacggctacggaccaagaggattaggtccacacggattgggccctagaggtctaggtccactaggtttggattcagatataataggtgatggatacggaccttacggattgggtcctaggggtctgggtccattgggaggtttgggaaggcgaccttacggtggatactctgcatctggttctgtatctgccgaaggcccacgtggatggtatggcccacgaggcttgggtggaattggtggttggagatccagaccatatggaggttactcggctagccactctgtcagtgttgaggccccagttgtataccatgcacctatcataaggagagctcccaaaatttctagatcatcctcctactccgtggaaagaatagttacaccaactgttatcaccagaatctctggttctcattccgtatccgcagagggtagaagaggtgtttggggtccacatggagtctggggacctagtggcctttacggcgattcaggtatagtcgacggagtctacggacctggtttggttggccctggaggctggggaagaaggccatatggaggatactccgcttctagatctgtcagtgctgaa

SEQ ID NO: 2165 - DNA, 840 bp, synthetic construct
  misc_feature 1..840: note = Description of Artificial Sequence: Synthetic polynucleotide
  source 1..840: mol_type = other DNA
ggtccaagaggctggtatggaccacgcggtctaggaccaagaggattgggacctttgggattagattctgacataattggtgatggatatggaccttacggactcggctcacgtggcctcggccccttaggtctggacagtgacataatcggtgatggatacggtccaagaggtctgggaccgagaggactaggaccacttggccttgactccgacataataggagacggttatggaccctacggcttgggtccacgcggattgggtccactcggaggtttgggaaggaggccctatggaggttacagcgcatctggtagtgtttctgcggagggaccacgcggatggtacggcccgagaggcttgggtggtattggcggatggcgttcgaggccatacggtggatactcagcctcccattcggtgtctgttgaggctcctgttgtctaccacgcaccaataattcgtagggctccaaaaatttctagatcagcttcttatagtgtcgaaagaattgttagacctaccgtaattactaagatccataagtctgtttcgcattctgtggaacaacctatttactatcgaccaccagttgttgttcgcgctccaaaagtcagcaagtctgaatcctattccgttgaacgtattgtaactccgacagtgattactcgaatacatcactccgcatctgattctgtagaacagcctatttattacagacctcctgttgttgttcgacgtccaaagatttctagatctgcttcttattcagtagaaagaatcgttaccccaacagtgattactaggattagcggctctcactcagtctccgctgaa

SEQ ID NO: 2166 - DNA, 384 bp, synthetic construct
  misc_feature 1..384: note = Description of Artificial Sequence: Synthetic polynucleotide
  source 1..384: mol_type = other DNA
ggtaagattggccataacgcccagaaaggtatcgatgacttcttgggtggcgcccacatctcgaaatgtggcaaacatgagcgaattttacaaggagaggatattattgaaactaacgctaaaggagaactgatcgagaagattgtgtcacgtaaggagattcttacagacgatgatagcgaatccttctctgtttcctacagtagtgaggacgattctacagaaactatagttaagactattacaatcgtgcaagagattcctaagcatggaaaaggtaagggtcatgctaaggaaaaaattttcgaagaagaaacggttatcaaaaaaatcggaaagggtgtcgccgcacctgtagttgctcctgctgttgacatagttgga

SEQ ID NO: 2167 - DNA, 600 bp, synthetic construct
  misc_feature 1..600: note = Description of Artificial Sequence: Synthetic polynucleotide
  source 1..600: mol_type = other DNA
ggtagacgcggtgtctatggtccacgtggcgtctggggaccatcgggtttatacggcgattctggaatcctcgatggcgtatatggtcctggtttagtaggaccaggaggatggggacgtagaccatacggtggttactccgcttcttcatctgtgtcggcggaaggcccaaggggatggtacggtcctagaggactgggtcctagacgtatcggcctgggaggctactcagcctctggttctgtaagcgctgagggaccaagaggatggtatggaccaaggggcctaggacctcgtagaataggttctttaggtggatactcagcgagtggttctgtttctgctgaaggtatcagaggcgtacttcgtccgtcccctggtattgtggtgcctggtgttatatcctccggtgtggttgctcctggcttagttggcggacatggaggattagtgaacgtcggtggaacccacgtcttgccaggtacatctgtctatactacacatccagatcctagaacggttagatcttcctgtagaacctccccctacaacctattgattaaagttggtaacgctagaaagctgaatggcaattgttca

SEQ ID NO: 2168 - DNA, 771 bp, synthetic construct
  misc_feature 1..771: note = Description of Artificial Sequence: Synthetic polynucleotide
  source 1..771: mol_type = other DNA
ggtaacagatactacgacctatggaacacatgctgtcaaagaccaagatacgacggatgcggtatttttggaaaccatctatgggattacgttaagtactcagcctcatggtcacattccgtagaaaactatgatgttggttaccatggattttactgggatgattcgtgggtgcatggcgtgcctcatggtaactactactacccgctttggaattactgctgtcaacatccaagatgtaataggtgcggaatttttggccatcacttgcaggactatgttaagtactccgcatcatggtccacctctgttgagaactacggttacgatgtcagttatccgggtttctactgggataactcttgggtgcatggtgtgccacatggaaatcactattaccctctatggaactactgttgccaacatccaagatgcaatagatgcggaatcttcggacaccatctacaggattatattaaatactctgcttcttggagtacttcggttgagaattatggttacgatgtcggctacccaggattttactgggacgactcctgggttcatggtgtcccacatggaaatcattactatcctctctggaactattgctgtcatcatcctaggtgcaaccggtgtggtatttttggccatcatttgcaagactatgtgaagtattcggcttcttggtctacgtccgtcgaggactacggtggatacgattacgacttctactgggacgactcttgggtacatggcgttccacatcta

SEQ ID NO: 2169 - DNA, 816 bp, synthetic construct
  misc_feature 1..816: note = Description of Artificial Sequence: Synthetic polynucleotide
  source 1..816: mol_type = other DNA
ggtcgaggtctgggcagaggtaaacacggctggggaggacttggacacggaggactaggaggtttgggtcatggaggactgggtggtctaggtcacggtggcttgggaggactgggtcatggcggtttgggtggcttgggttccgactctggcgacttaggcggaataggcggtctgctgggaccaggtggtcgtagaggttggggtcgtcgaggcccgggtaagtattctgcttcggtgagtatttctcattctatttctatcgaacgagtaattacacctggcgtttacacttctatacatagatcggtttctgtttcgcactcagtctcggtagaacatagaaggagaatagctccaattgtcgtggactattccatttcgtctagtcttagtatctcaggcgaaggaagaggacttggaagaggtaagcacggctggggtggcctcggccacggtggactaggtggcttgggtcatggtggcctaggaggtctgggacacggaggtttgggaggtttaggacacggtggacttggtggccttggaagcgattctggtgatttaggaggtattggtggccttctgggcccaggaggaagaagaggttggggcaggagaggtccaggaaagtacagcgcttccgtttccatttcccactctattagtattgaacgagtaatcacgcccggagtttacacttcaatacatagatctgtgtcggtttcacattctgtctctgttgagcatcgtaggagaatcgctcctattgtagttgactactctatctcctcctcattgtccatttccggagaa

SEQ ID NO: 2170 - DNA, 816 bp, synthetic construct
  misc_feature 1..816: note = Description of Artificial Sequence: Synthetic polynucleotide
  source 1..816: mol_type = other DNA
ggtaggggacttggtagaggcaagcacggttggggtggcctgggacatggtggtttgggtggtcttggacatggaggtttaggaggcttgggtcatggcggactcggaggtctgggtcatggtggactcggtggtctgggttccgactcaggagatctgggcggaatcggtggtcttttgggacctggtggtcgccgcggttggggcagacgtggtccaggaaaatattccgctagtgtttctatatcacactcaatctcgatcgaaagagtgattactcccggcgtttatacttcaatacatagatctgtttcggtttctcattcggtgtcggtcgaacatagaagaagaatcgcccctatcgtcgttgattactcaatatccagtagcttgtcgatctccggtgagggcagaggtcttggtagaggaaaacatggttggggtggcttgggtcacggtggacttggcggtttgggccatggaggtttgggaggactaggccacggtggtcttggtggcctcggacatggtggacttggtggtttaggaagcgacagtggtgaccttggaggaatcggaggtctattgggtcctggtggaagaagaggttggggacgtagaggtccaggtaagtactcagcatcagttagtatttcgcattccataagtattgagagagtcataacacctggtgtctacacttctatacacagatccgtctctgtgagccactcagtaagcgttgaacacagacgtagaatcgcaccaattgttgtagattacagcatctcttcaagcttatctatttctggagaa

SEQ ID NO: 2171 - DNA, 654 bp, synthetic construct
  misc_feature 1..654: note = Description of Artificial Sequence: Synthetic polynucleotide
  source 1..654: mol_type = other DNA
ggtagaggtctaggcagaggaaaacatggttggggtggcttgggtcacggcggtttaggtggactaggacacggtggtttgggtggtttaggtcacggaggactcggtggtctgggacatggtggattgggtggtctaggtagtgattccggtgatctgggtggaatcggtggattgttgggtcctggaggaagaaggggatggggtagaagaggccccggaaaatatagtgcaagcgtctccattagccattccatttcgattgaaagggtcattaccccaggcgtttacacttcaatacataggagcgtgagcgtctctcacagtgttagtattgaacgacctcgccgtatcattagtcctgtcgtagattattcattatcaatctcagcatcctcctctgtttctgctgaaggtggccgtcgtagaagattacctggatcctgcggtactattatttccgattcttcgagtaacgttggtggccttggaagaattggtgctctacacaagttgggtggaggccgaatcccaagacctgctatctataccagacaccctggactcaaaggattaaagccacaatgtcctctaagtaactttaatgttcatgtcaaagtaggaaacattagaaaagccaatggtaactgcgga

SEQ ID NO: 2172 - DNA, 768 bp, synthetic construct
  misc_feature 1..768: note = Description of Artificial Sequence: Synthetic polynucleotide
  source 1..768: mol_type = other DNA
ggttccagtgtaatcgacaagttggaagatttactgactcacggacaccatggtcaccattgggaaggcacagatggtttgcacgaaaaattgctgcaggaggatgacgtcattgaagccaactccaagggagagatcattgaaaaaattatctctagacgcgagattattacagacgataattctgaatctgaatcagattcagattcttctgaggactctggcagcacagagaagatcatcaagcaaattatcatcgtccaagagaagccgaagcatggacaccaccacgctaaggaaaagatatacgaagaagaaattattattaagaaaattggtgatttgcctaaaaaggattgtgatgaaaataagcctagagaagtaacttcgtggcgtcacactttacctaatagaaaaagtatttcaatctcaaaatccatctctattgaacaaataatcaaaccacatgtcatcacgagaatccgcacttctaagtctagttccttgtccatttcggtggagcgtcctagaagaataatttccccaattatctcgggtggttggaacagacacaaacctagaaagtacagcgcatcttcttccattagtaagtcgatctcaattgaaagggttatcactccagctgtgtggaccaggattcacaaatcagtgtccgtttctcattctgtttcagtagaacatagaaggcgaattgccccgatcgttgtggattactctatcagttctagtttatctatttctggtgaa

SEQ ID NO: 2173 - DNA, 1272 bp, synthetic construct
  misc_feature 1..1272: note = Description of Artificial Sequence: Synthetic polynucleotide
  source 1..1272: mol_type = other DNA
ggtagaagaagaggaccgtggggatacggcagaggattgtctggatccggtgacctagacggcctaggtggtgtgggaggactcggtggtttgggcggcttgggaggcagacggggtccttggggtaggggctatggcagttcgggaaccgttagtgtctctgtttccgtcgaagagggtagacgtcgtggaccatggggaagaagaggcaaagtatcaattagccgttctgtttccatcgagagaattgtaacgccaggtgtgtacacacaaatctccaggtcctcatcagtttctgtggaaggaggaaggagacgtggtccatggggacgaggttatggacctactggttccgtgagcgtttcagtttctgtagaaggtggtcgaaggcgaggtccttggggttatggaagaagattaggaggattgagcggtagcggagatttggatggcctaggtggtgttggaggtttaggaggactaggaggtttaggtggtaggcggggtccttgggttagaggttatggcagctcggtgtcagtcagtgttagtgtggagggtggtagacgacgaggaccgtggggtagacgaggtaaagtctctattagccgttcaggatctatcgaacgtattgtgaccccgggagtatacactaagatatctagatcatctagtgtgtccgttgaaggtggccgaaggcgtggtccctggggacgaggctacggtagctccggctccgtttccgttagcgttgaaggtggacgtagacgaggcccttggggaaggaggggtaaggtgtctatttctagaagcgtatccattgaaagaatagtcacccctggtatttacactaaaattagtagaagctcaagtgttagtgtcgaaggaggcaggcgcagaggaccttggggttacggtagaggactaggtggactctccggctcgggcgacctggacggattgggtggtgtcggtggactaggtggattaggaggtttgggaggacggagaggaccttggggacgtggatacggatcttcgggttctgttagcgtttccttatcggtcgaaggtgtgaggagacgcggaccttggggtagaagaggaaaagtctccatctccagatctgtctcaatagagagaatcgttaccccaggaagctacagcaagatttcccgttcctccagcgtttccgttgaaggaggaattcgtagaggcccatggggcagattcggtggttttgtttcctccggttcttcatcagtcgagtca

SEQ ID NO: 2174 - DNA, 2202 bp, synthetic construct
  misc_feature 1..2202: note = Description of Artificial Sequence: Synthetic polynucleotide
  source 1..2202: mol_type = other DNA
ggtcctattgcaaactttgttggattcgtcatctctttgcttttctctttattcgaggtgatggtgtcagtcgttttcgacgtaaagtcctttacctctttgagcactccaacttgtaattctacggtgccatccttcgccactagagtcggtggtggtagattcagcggtatcataactgcttccttcaacatgatagctatgatcagtgctaacgtgcaagcaatacaatcaggctctggaagtaccagtggatcatcgtcctcctctactacatctacctccaacagtacaactactacttccaactccaccaccaccacgactaattcaactactactactagcaattccacatcctcttcaaattccacctcaagtggtcttacaagcagtgctagcgttgtctctctgatagatacaatcgcctgggtgtaccaggactcttcggttggaattgcttacttgatggtttctattttagctcttttctatggacaaagcgtttcagctccaccataccctgaccttggcattccagccttgccggctaattgctccggccctggagtcccacagtctgttcaaatcagagccgctattgcatatgtgaacatcacaatttacttcattaacatgacaggacaacaatttgaggatctacaaggtcccgttgccactgattgtggctgcccaaacacgacaagcgttgctccattagtccttgagtgggaagctatcttggctgccttgcaagccctggcaaacagtaccgcttctgctaacagcacgacttcatcaaactcaactaccactactacaaccaactctacatcaaccaccactacaaattctaccacaacaactaactcaacctcctcgtctaattcgtctaccatagctggatgtattgatatatctgcgaacttaactatcgctttgcagaacttgcaggctcttctattgcaagagagcacttgtgctccagcactcgctgcaaatgccaagaagtcgggagtgagggatatgtccccttgtaagcctggaaaaacagcaagtggatgtgccaaatctggcgaaaaaaaagttaaaagaaaggctaggctcgaaaagatgcgagcaaagtgccgtagagcggttggtaacagaatgaaaggatcaatgaagaaacgtgtgagatcacgcgccaagaagttcggtaaggccgcaaagtcgggtgtaaggcgctaccgaaaaaatattaaatacgtgtatatcccacctgttatggcctcccttaatgcttacgctgctctgatggcttcgttgtctgaatcaatttcttctcaatccgattccgctcttaactcgactgatcaagcctgtaactcaactggatctaacacggatgcagctgttattgctgctacgaacaacgtcacagacatgttcgcaaattttactgcaatggttttgaataatactgttgcttacccaaactgcacacagtttgctgatatggctttgctaatgatctctcagattaacgatcagatcatttcttgtggctcgcagtctgatgatgctgagtctagcatatactttaatgtaacaatgaatatcgtcgctatggctcaagagtataacaacttcgcttccatgtctgacaagtgtacaagatctttcgcgaattcttggctctggatgtatattaagtgggtgttttatcggatgggaatgacatcgggaattccaaattttctggcctgccaaactaaggctgagagttctctaactgcctttctggcatcatttaatgctactatcaatgccacaatagcagctgcttcggctaactcatcctcggttcagagttccgaagcttcttgcattgagagtagtctatctgacgcctcagctatcttggcaatgtatgagaacgcttaccagaactgcgtcgcacctggttccgttcctgatgctgccaatacaactacaacatctacgactactacgaccacaacaacaactactgctgccccaacgactactaccactaaagctgcaaacgctccattcacctacccactatgtaacctccagatgacggctgcttgcgtggcggctctaccaacatgtacctacccattcatttcatcagctggatgttgtccatctggtaagaccctaaacaccggtctgggtggaaggggatgttgtaaa

SEQ ID NO: 2175 - DNA, 894 bp, synthetic construct
  misc_feature 1..894: note = Description of Artificial Sequence: Synthetic polynucleotide
  source 1..894: mol_type = other DNA
ggttgcgagtgtggatgcgctgagctgaattgtccgcagaataagaaaccaaacaaagaaacatgcgagtgcgaatgtaagattctggctaagtgtaacgacggacaagtgtttaacaaggacacgtgttcttgtaattgtcctggaagcgcttcggacaaagtctgcaagaagcctcaaatctacaataacgagtcttgtaaatgtggctgtccggtagatatgcagaaaccaattgacggttgccctaggcctcaaagatgggagtctgattcatgtagttgcgaatgccctcttaaacaagattgcaaaaatggtaaagtgtgggacgcaaccatctgccaatgtatctgtcctcgtgatgcattgccatgcgctgctggtaaggaacgatgtggagaatcttgccaatgtaaatgcatcaatagagagccaaaagaaggatgttcaaagtcacttgtctggaatgaggacaaatgtgaatgtgtatgcccagcaggtaagcagatgcctgttggtggttgcgagtctggtaaatcctttaacgcattgacatgtcaatgtgagtgtgacgagtccgcttcaaagtgcggaaacaaacgttggaacgcggatacatgtaagtgtgaatgtcaacctggaaaaccgccagaaggttgtggcaagcaaacctggatctctgaaaagtgtaaatgcgaatgttctcctgctattacctgcgaggccccacaaatcttggatccaaacacctgtgagtgcaaatgtcctgtcaatatgcttgccgaaaaggagaaatgtaaactaccaagacaatggacagactccaaatgcttgtgtcaatgtcctaccgccccagtgacttgtgaaggtaaagaaacctggtgtggtgaaaca

SEQ ID NO: 2176 - DNA, 891 bp, synthetic construct
  misc_feature 1..891: note = Description of Artificial Sequence: Synthetic polynucleotide
  source 1..891: mol_type = other DNA
ggttgccaatgtgagtgtaaaaacaaacaagagatggctaactgcaaatctccaagaacatggaactatgacacttgcaaatgtgattgcaagaacgcggatgattcagatgattgtgttaagccacaaatttggttggataaccaatgtaaatgtggctgcccagcatcagcccagatgacttgcgccgacaacaaacgattcatagaaaagtcttgtaagtgcgaatgcaagttagctatgcctgccactattccgccaggaaaaaaatggaacgaggataaatgtgtcctcgaatgtgcaaacgttaagacttgtgagggtcctcagagatggtgcgataatcagtgcaagtgcatctgcccgcaagttaacactaagtgttcggacaagcagaagtttatcgagtctaaatgcgagtgtggctgtgacacgcaaacgcaatgtaagaacggattcagatggtctaacttagagtgcggttgcctgtgtgatgagaaaaaatgccagggtaagcaagtgttcgacaagaatacttgtcagtgtaaatgcccaaatcaaaagccaggtgacacatgcggaaacggaaaagatttttgtccacttgattgttcttgtaaatgtaagtctcctaaaccagctaatggctgccctggtgttcaagaatggaacgaagaaaaatgtcagtgtgagtgtcctaaggacaaaccaaaaaagcaatgtcctggaggtcaagattggaataaccacttgtgtcaatgtggatgtccaactcctgcgcccacttgtagcaataagcagaagtacagtaatgtttcttgttcttgcggttgtaagcccggtaaacctaaggaaggcagacctggtaagcaaatctggtgcgaaaacaca

SEQ ID NO: 2177 - DNA, 897 bp, synthetic construct
  misc_feature 1..897: note = Description of Artificial Sequence: Synthetic polynucleotide
  source 1..897: mol_type = other DNA
ggttgccagtgcgaatgccctaaaccaatgcctacggagggttgcggaccacaaagctggaacggagagtcctgtaaatgtgaatgcccttcatctattacttgttcctctcctcaaattattgacaaagatacttgtgagtgtaagtgccctaaaaatatgctagctgataaggaaaaatgcacggccccacgacaatggatcgattcaagctgttcttgcaaatgccctaccactccagctgtgtgtgagggtaaccaaaaatggtgtgacgaatcctgccaatgcacttgccctggtggtaagaaagagtgcggtgacaacaagtactttgatgagtcaagttgtgaatgtaagtgtaagtctaatcctacctgttcggacccacaaatttgggatgctgacgactgttcgtgtaagtgtccgaaggataaaaaaatgccgaagggcggttgtcttaatggacaagagtggaacaaactagcctgttcctgtggttgccctgaaccacgtcctgtttgtactgacgagcagacatataacaataatacgtgtaaatgcggttgtggcattgacaagccttcatgcccgaagcaacaaacttacaattggaataagtgccagtgtggttgtccagaggaaatgaagaagccagccggaggttgcggtgctaagacatggttggaagaagattgtcagtgcaattgcgttcctggtaaacctgctggaggttgcttgggtgctcaaaagtggtgcgacgacgaatgtatttgtaagtgcagtaacagtgaaccagccaagggatgtggaaataaacagtggtctgatgtcagttgtgattgtgagtgcccaactaaaaagacctgtgcggatcctcaggtttgggacgctaacaca

SEQ ID NO: 2178 - DNA, 858 bp, synthetic construct
  misc_feature 1..858: note = Description of Artificial Sequence: Synthetic polynucleotide
  source 1..858: mol_type = other DNA
ggtccatacggcgacggtttgggtccaagaggatatagtgcgtccgctagccagtccggcgaaggcggttggggatacggaccttacggcggtagtcttggaccatatggaggttccttgggacctagaggatactccgcttctgcctctagaagcgttgagggaggatggggttatggcccttacggaggcggtgtaggtccatatggtggaagtttaggaccatacggagatggcctcggaccatatggctctggagtcggtccgtacggtgatggattgggaccatacggaggtggtgttggtccatacggagacggacttggtccttatggcggatctttaggtccttacggtgatggattaggtccttatggtggaggagtcggaccttacggtgacggtcttggaccatacggcggttctttgggaccatatggtgatggactcggtccaagaggttactccgcctccgcatcccagtccggtgaaggtggctggggttatggcccatatggcggctcactcggaccatatggtggttcccttggaccacgcggatactcggcatctgcttcacgtagtgtcgagggtggatggggttacggtccgtacggtggaggtgttggcccatacggaggaagcctaggaccttacggagacggactgggtccatatggatccggtgtaggaccttatggtgatggtcttggtccttacggtggtggtgttggtccttatggagatggattgggtccatacggaggatctttgggaccatacggtgatggtctgggcccatacggtggcggtgtcggtccttatggagacggattgggtccttatggtggctcctta

SEQ ID NO: 2179 - DNA, 960 bp, synthetic construct
  misc_feature 1..960: note = Description of Artificial Sequence: Synthetic polynucleotide
  source 1..960: mol_type = other DNA
ggttccgcaggagcctctagtaacggatccgttgctggtgcatcaaaaggtgccgcaggagcttcaagtaacggttcatccgcttcagctagtaagggaagtgctggagcaagttcaggatcgtctacggccactgccagtaaaggatccgctggagcctcttcaaatggttcatctgcttcagctactaaaggatcggctggagcttcttccggaaacagtacagccgtagcctccaaaggcagtgcaggcgcaagtagtaatggcagttctgcttctgcatctaaaggttctgcaggagcctcttctcagggatcgtctgctagtgcgacaaaaggatcagctggcgcgacctcaaatggatctagtgccgtcgctagtaaaggttcggccggtgcttccagtggaaacagcactgcttctgccactaaaggtagttcttctgctagtagtaacggaagctctgctggtgcatctaaggacggagctggcgccgctagcaacggttccacggccgtggcgtctaagggttccgctggagctgcctccggcaacagtactgcatccgctacaaaaggttcctcctccgctagctctaacggatcctctgctaccgcctccaagggttccgccggagctacttctaatggatcctctgccgttgcttcaaaaggaagcgccggagctagttccggaaattcgacagcttcagcatcaaaaggttctgccggagcttcttcaaacggatcttcagccacagcaactaagggatcagctggagcaacctcaaacggaagctcagctgtggcatcgaagggatccgccggtgcttcctcaggtaattcaacagcaagtgcttcaaaaggcagtgcgggtgcttcgagtaatggatcatcggctaccgcgacaaaaggttctgctggtgccacatccaatggttcgtcagctgtggcatcaaaa

SEQ ID NO: 2180 - DNA, 477 bp, synthetic construct
  misc_feature 1..477: note = Description of Artificial Sequence: Synthetic polynucleotide
  source 1..477: mol_type = other DNA
ggtcatccaacagattgcggcaactcaggaggctctagtggctcatctgctgcatccggagccgcttcctcttctggatcgggttctgcagctggatcaggtgcggcctcaggttccggagcagcctccggatctggagcagctagtggtagtggtgccgcttcaggtagtggtgctgcatcgggtagtggcgccgcaagtggctctggcgctgcatcaggaagtggcgccgcatctggcagtggcgctgcatctggttcgggagctgcctctggttcaggagctgccagtggatctggtgctgcttcgggctcaggagcagcgagtggttcgggagcagcttcaggctcgggatcagcttccggctccggtagcgcttccggttcaggatcctcttctggttcaggttcctctggttgtggatcaggaggctcagcatcaggatcctccggtggttcctcagcttcggcttctaaa

SEQ ID NO: 2181 - DNA, 558 bp, synthetic construct
  misc_feature 1..558: note = Description of Artificial Sequence: Synthetic polynucleotide
  source 1..558: mol_type = other DNA
ggtagtgcgggtgcctcatctggtaactccacagcttcagccagcaaaggatcagccggtgcctcttcaaacggttcctcagcaactgcttctaagggatctgcaggagctacctccaacggctcatcagcagtagcttccaagggtagtgctggtgcgagttccggcaatagtactgcttctgcctcaaaaggatccgctggtgcatcgtctgatggttcatctgcttcagcatcaaagggcagcgcaggagctacttctaacggctcctcagctgtcgcttcaaaaggctctgccggtgccagctccggtaattccacagcctcagcttcaaagggaagtgctggtgcttcctcaggaggaagtaccgcggcagcctctaagggatccgcatctgcaagtagcgacggtttttcagcagcttgtgactccggtgaatctgaggcagtggacaaagcgaacctagcagccattgccaatattgccgctgcagcaggtaagccagccgcatgtggttccgcaccaccttctgacgactattacgattacggttgtgga

SEQ ID NO: 2182 - DNA, 768 bp, synthetic construct
  misc_feature 1..768: note = Description of Artificial Sequence: Synthetic polynucleotide
  source 1..768: mol_type = other DNA
ggtagctcggctagtgcctcgaaaaactccgctggtgccagctcaaacggctcatcagccggagcaagttctggttcagccggtgcttcgagtggtggatcttctgcatccgctacgaagggctcagctggagcatcgagtggcggaagttccgctggcgcatcaagtggttcagctggcgcttcttccggcggctcttctgcctccgctaccaagggatccgctggtgcttcctctggttcaagttccgctggtgcatccaatggtagtgctggtgcatcctccggaggttctacagcaagtgctacaaaaggctctgcaggagcatcctcaggaggatcgacagccggtgcatcgaacggaagtgcaggagccagtagtggtggatccagcgcatcagctactaaggaaagtgcaggcgcctcttcaaacggatccagtgccggcgcctcgaacggcagtgctggtgccagttctggtggttcatcagcttctgcaactaaaaactcagctggagctagctctggtaattcctctgcgggcgcatcaaatggttctgcttctagcagctctggatcctcctcctctaccgccacaaaggaaagcgccggtgcctcgtctaatggcagcactgcttctgcaagtaaagatagtgctggagcttcatctggaggttctagtgctggagccacctgtagcggagctggagctgcttctggaggttccgtctcaagtgcaactaagaattcttccgctgcatcttcacaa

SEQ ID NO: 2183 - DNA, 864 bp, synthetic construct
  misc_feature 1..864: note = Description of Artificial Sequence: Synthetic polynucleotide
  source 1..864: mol_type = other DNA
ggttcctcaggtggtgccacttcttccgctggcgctggatcagcttctggctcctcgggaggaagtacttcgggagcctccgccggatcggccagcggatcttccggtggatctagttcttcggcgggtagtggttctgcctccggtagctctggcgactcgtctagttccgccggatctggaactgcttcaggaagtagcggcggtgccacttctagtgctggcgcaggatctgcctcgggatcctccggtggttctacatctggagcaagtgccggatcagcatcgggctcttcaggtggaagttccagttcagcaggttcaggaagtgcatctggatccagtggcgattcatcgtcatcagctggttccggaactgcaagcggatcttcgggtggtgcaacatcttctgctggagctggatccgccagtggaagttctggaggttcgacttccggtgcttctgcaggaagtgcttccggaagtagtggaggatctagtagttctgcaggttctggaagcgcatccggttcatctggagactcttcgtctagtgctggaagcggaagcgcgagcggcagctcaggaggttctacttcaggagcatctgccggttcagcatcaggttcttcgggtggctcgtcaagttccgctggttctggtagtgccagcggttcatccggtgattcaagttcatcagctggctctggatctgcttccggatcttcatgtggatcaacctccggcgcttccaatggctccgcttcaggaagttcgggtggaagctcttcatctgctggatcaggttcggctagtggatcctccggagattcctccagctctgcaggatctggcagtgcttca

SEQ ID NO: 2184 - DNA, 399 bp, synthetic construct
  misc_feature 1..399: note = Description of Artificial Sequence: Synthetic polynucleotide
  source 1..399: mol_type = other DNA
ggtcaagatagtggatgtaatgtcattgcctaccctactgcttcatgtggtgatagtggatcaggctccgccgcttcttctggtgcggcgagtagttccggctccggatccgccagtggaagtggagcagctagtggtagcggaagtgccagtggtagtggagcggcatcaggttccggatcagctgcaggaagtggagccgcttctggatccggagctgctagcggatctggatcggcctccggttctggttccgcatctggcagcggctctgccgctggttctggcgccgcttcaggatccggtagtgctagtggttcaggtagtagttcttcaggatcttctagttctggatcctcaggaggatgtggaggtggctctggttctgcaagttccgga

SEQ ID NO: 2185 - DNA, 486 bp, synthetic construct
  misc_feature 1..486: note = Description of Artificial Sequence: Synthetic polynucleotide
  source 1..486: mol_type = other DNA
ggttcgtcgggcggatcctccagtgcagccggtagtggatccgcttccggagcatctggaggagctacctctgctgcaggaagcggttctgcttcaggatcttctggaggatcttcttcaggagctagttcaggttcagcctctggctcctctggaggttgtggttctggaggaagttccggaagtggtagtggaagtgcttcaggaagcggtagtgcttctggcagtggatctgcatcaggttctggatctgcctctggaagtggagccgctagtggtagcggagctgcttccggatctggcgctgcttccggtagtggagcagcctccggttctggagccgcttctggatcaggagctgcaagtggatcgggtgccgcttcaggttccgccgccgcttctggtgccgcttcttcctctggatccgctagtggctcaggttcaggttctggttctagtgacgattctgaggacgactcttgtgga

SEQ ID NO: 2186 - DNA, 630 bp, synthetic construct
  misc_feature 1..630: note = Description of Artificial Sequence: Synthetic polynucleotide
  source 1..630: mol_type = other DNA
ggtgctaatggagcagctgctgcttcagctgctgctgctgcggctagaagagcaggagctattggtttgaacggagcagcgggcgctaatgtagctgttgctggcggtaagaagggcggagccgctggtcttaatgcaggcgctggtgcctcattggtatccgccgcggcaagaagaaacggtgctctcggactcaacggagctgctggtgcaaacttggcagctgctggaggtaaaaaaggtggtgctattggacttaacgctggtgcttcagccaatgtcggtgcagctgctgctaagaaaaatggtgcaataggtttgaattccgccgcatctgccaacgctgccgctgcggctgccaaaaaaggtggagcaattggacttaatgcaggagcctcagcgaacgcagctgcagctgcagctaagaaatctggtgctgtaggtctaaacgcaggagcgagcgctaacgccgctgcagctgccgcaaagaaatcgggtgcagtggctgcaaactctgctgcttcagcaaatgctgcagcggcagcacagaaaaaagccgccgctgatgctgctaatgctgccgctagtgaatcagctgccgcagccgccgctaagaaggccgctgctgta

SEQ ID NO: 2187 - DNA, 600 bp, synthetic construct
  misc_feature 1..600: note = Description of Artificial Sequence: Synthetic polynucleotide
  source 1..600: mol_type = other DNA
ggttccgcttccggttcagctagtggttcaaagtccgaaagtggatctgcatctggatctgccagtggaagtaaatcagagtctggttctgcctctggtagcgagtccggctccgctcaaggtggaggttctaaaagcgaaagtggcagttcctcgggttcggcttctggctctaagagcgaatctggttcggcatcaggttccgcctctggatctaagtcagagtccggatccgcttccggctcaggatcaggatctaaatccgaatcaggctctgcttccggatcagcgtctggttcaaagtcggaaagtggatctgcttcaggtagtgcttctggatccaagtccgaatcgggatctgctagcggaagcgaatctggttcagcacaaggaggtggttccaagtcagaaagtggaagtagttcaggttcggcttccggatcaaagtctgagtctggtagtgcatccggttcagccagcggaagtaaatccgagtccggctctgcctcaggttccggttctggttccaaaagcgaatccggttccgcaagtggatccgaaagcggttcagcagccggaggtggctccaaatccgaatca

SEQ ID NO: 2188 - DNA, 798 bp, synthetic construct
  misc_feature 1..798: note = Description of Artificial Sequence: Synthetic polynucleotide
  source 1..798: mol_type = other DNA
ggtgctgtttacctaagactgtcctctgacggttcatgcccagctgaccaggtttgttgtcgcgaagaggactctaatgaaatctgcggcggtacatgtgtgcctgagggagcctgtgaagccggtggtatcaacctgagggttggaggtgccggaggtggatgtagctttggagagatatgctgtgatttgccgcttaaccgatgcagaggaacttgcactactgtagatctgtgcggtgataataggagagtggacttaagattcgaggatcagctgtgtcctggttcgcaagtctgttgtgagaagtccaagacaaacgctatctgtcacggaagatgcgtcgctgctaatgaatgttcgagatcctctaacttagtggacctgcgtgtacaatcgaacgatggatgcccaggtgacagaatttgttgccagaatacgtgtgagggacaatgtgttccaagaggacagtgtggtgatgatacaaaagacattgaccttagagttggcgattcttcctgtcccgaaaatcaggtgtgttgtaagaatccaagaacctgcacttgcgtcgatccatctaaatgtccccaaatgataaaccttcgctttagttcagaatgtccatttcaccaagtttgctgcgacagcgtcagcgactctaattgtcaaggtctatgtaccccagatgaccaatgtaaggttcgctcaaatggaacctgcagtggtggtcttacatgttgtggtaaaataaagccatcttgtgatggttcttgtgtgtcccttggacaatgcccgaca

SEQ ID NO: 2189 - DNA, 774 bp, synthetic construct
  misc_feature 1..774: note = Description of Artificial Sequence: Synthetic polynucleotide
  source 1..774: mol_type = other DNA
ggttgccctgcaaaccagcaagacccgtttgctgtgtgttgtaggaatgcgagtaaactttgtaacggttcttgtgttagtcaagagcagtgcgccgacagtggcttcgatttgagaatatcttctcaaacttgtccaggcaacgctgtctgctgtaagaacctgagcaagtcaccaacaggtaaagtctgccagggaagatgtgtacccagccagcaatgtactggacaatctcaaaactcggtcgacttgaggttttctgaaggtctatgtcctttaaacctagtctgttgtccagcaagtacgtcttgttcgggttcatgtgttgccggtaatagatgcctggacaacgctttgtccattaatcttagacgttcgactgaatcttgccccgcaggattggtatgctgccagaatgttaacaaaggttctacttgtgatggacagtgtaccagtcgtgacagatgcgctgacctcaccttgggaatcaacttgagactatctgatcagtcttgcccatccaatcagatatgttgtaagaaagtcaggaagcctttgcctgatgccgagtgtacctgcgtaatgctagaccaatgcgctgatgaccagagatcaatagacctaaggaccggtggtcaaaagtgtccatcaagaaaaatctgctgcacaaagctaaagaccacagtagaaaaatgtgatggctcctgtatctcataccaagactgtccagaaatagcaaatgcatcttctgttgatttgagattgttttccgga

SEQ ID NO: 2190 - DNA, 1131 bp, synthetic construct
  misc_feature 1..1131: note = Description of Artificial Sequence: Synthetic polynucleotide
  source 1..1131: mol_type = other DNA
ggtgttcctaaagaactgggtacctcaattagctcagcttctgctagtgctagtgcttcagcttccgccaccgcttcgtcctcttcaaagaacgtccatttattgcctttaaaaagtgaacatggaattgtaatcgacaagtctaaatttaacattaggaaagtggtcttgtccgcaattgatgaaattaacggagctcctaatattggtctaggtttgaagcaagtaagcttggctcttgcaaaggctcaagcaagtgctcagtcctccgccgaggccctggccatcattaagaaaattgtcgctctacttattagtgcctatgttcgtgcagcagaagccgccgcaagagcttctgccgaggctctggctactgtgagagccgcagagcaggcacagaagattgctgaggccaagggccgtgcggctgctgaagctctgtctgagcttgtcgaagctagtcaaaaggcagatgctgccgcagctggtaccaccgacgctatcgagcgcacttatcaagacgctagggcagctacttccgcgcagactaaggcctccggcgaggccgaaaacgccaataggaatgctgctgctactttggccgcagtgttgagcatagcaaaggctgcttcaggacagggtggtacgcgtgctgctgttgatgccgctgctgctgcagcagccgccgcggccttgcatgcgaaggccaacgctgtgagccaagcgacatcgaaagcagccgctgaagctcgtgtcgctgcggaagaggccgctagtgctcaagcttcagcatcagcatctgcccaattgactgctcaactagaagagaaggtatctgcagatcaacaagctgcttcagcctccacagacacgtccgcagcaatagcagaggctgaggctgctgcattagcatccactgtgaatgccattaacgacggagtggttattggtttaggtaacaccgcttcttcgtctgcacaggcttcggctcaggcatctgctttagctagggccaaaaatgctagacctaagattaaaggttggtataaaatcggcggtgctacctccgcaagtgctagtgcctcagcttccgcatccgctcaaagctcatcacagggattggtttattca

SEQ ID NO: 2191 - DNA, 1119 bp, synthetic construct
  misc_feature 1..1119: note = Description of Artificial Sequence: Synthetic polynucleotide
  source 1..1119: mol_type = other DNA
ggttcgaaaagctacttgttaggttcgagtgcctccgcatcggcctctgcatcagcatccgcatctgctggaggttcaactggaggtgtaggtgttggtagtgtaattagtggcggaaacaatattatccgtggtgcttccacaacatcggttactttagccgcagccgctgccgaagcaaaggccgctcttaatgccggtaaggccactgtcgaagaacaaagggaagccttgcaattactgaccgccagtgcagaaaaaaacgccgaagctcgttccttggcggacgacgctgccgttctcgtccagggtgctgcggaagcacagagtgttgctgctgctaaaactgtcgctgtggaacaaggatctaattctttagatgctgctgcagcggaggctgaggccgctgccgccgctagtagagtttccgctcaacaggccttgcaggccgctcaaacgtctgctgctgccatccagactgctgctggctccgctctcacagctcttaaactcgcaagaaaacaagaagctgagtctaacaacgcagccgaacaggcaaataaagcacttgcattatcgcgcgcagctagtgctgctactcaacgagcagtggctgctcaaaatgccgctgcagcttctgctgcttctgctggcgcagctcaggcggaggcaagaaacgcttatgccaaggcaaaggctgctattgctgccctaactgctgcccaaaggaattacgccgctgctaaggcctcagcatctgccggaagcgttgtggctgagcaagacgctcaatctagagctgccgacgctgaggttaatgcggttgctcaggctgctgctcgcgccagtgtcagaaaccaagagatagtagagattggtgctgaatttggaaatgcgtccggaggagttatctctactggaactaggtcatctggtggtaaaggcgtttctgtgactgctggtgctcaggcttccgcttctgcgtctgctacgagctcatccagtagttcgtccggaatcaacaagggacatcctagatggggacataactggggtctgggtagctctgaggcatctgctaatgctgaagctgaatctagtgcatcttcatactcatca

SEQ ID NO: 2192 - DNA, 1275 bp, synthetic construct
  misc_feature 1..1275: note = Description of Artificial Sequence: Synthetic polynucleotide
  source 1..1275: mol_type = other DNA
ggttctgaattggttggatctgatgcttccgccaccgcgtcagctgaggcatcagcctcgtcctctgcttacggatcaaaatatggtattggtagcggtgcagtgtctggtgcttctgcatccgcatcggcatctgctagcgcctccgcaagtgctagtagtgctccagccatcgaaggagtaaatgttggcactggagtttctaacactgcatctgcctctgctgaggctctttctagaggtctgggaattggccaagcggccgctgaagctcaagctgccgctgcaggtcaagctgctattgctgcaaagtcgtgtgctttggccgcaaaatcaactgcacaggctgtcgctctggttgaaaaagttgccagagctgaagttgaccttgccgagtctgccaggaaggcgaccagattgtcagctgaggcggctaaagctgctgctgaggttgaaaaagacttagttggactcagaggcgccgctggaaaactgaatttggccgctagggcaggcagcaaagcacaggagagagccaatgaagatagtattgaggctaacgagcttgcccaggccactgctgcagctggtgctgaagccgaggctaaggccaatgcagcacaggaggctggtgcaagtgctcttgctattgcacaagcagctttgaatatagaacaagagactgttaaactcacgagacaagcacaaaatacaagactacgatctgagaatatcctggcagccgccagtaatgcgcgtgctattgcttccgcagaggctgaggccagtagtgacctcaacaatagagccaacgcagctagatcaaacgccagggctgctgctgagactcgtgctgttgccacagaggccgcttctaccgccgaaatagccgcttactcttcctcggaaaagggtgaaattaccaacccaggccctctgcctaaaattgtatcggtgactgctggtcttacacagaacgaaattgctggttcaggtgctgctgcatccgctagtgcttccgctctggcttctgctagtgctggagctggtgcgggtgctggcgctggtgctggtgcttcggcaggagccggcgctgtagcaggagccggtgccggtgctggtgccggagcttctgctggagcctccgctggtgctaacgctggagcgggagctagttctttgctattgcctcaatcaaagcttcatccaattagtcgatcctctgcttccgcttctgcatctgccgaagctgaggccaactcttctgcatatgca

SEQ ID NO: 2193 - DNA, 1143 bp, synthetic construct
  misc_feature 1..1143: note = Description of Artificial Sequence: Synthetic polynucleotide
  source 1..1143: mol_type = other DNA
ggtgttattggtccagacacatcctcttcttcgcaggcatctgcttccgcttcggcttcggctagtgcctccgcatcttcttcagcgagtattggttacaacgagctgcacaaatcgatcaatgctccagcactggctgtgggtgttaagaatggaggtgtagatgtggctaagggagctgccgttgtcgagtcagctatttctgatgttagtactttgactgacgacagaaccttgaacggtttggcaatcataggcaattctgctgaatccctggcaagagcacaagcaagttcttctgcctctgctggcgccaaggctaacgcactgataaaacaatcgatcgctgctatagagatcacggagaaggctgaatatttagcatcgatagttgcgaccaaagcagctaaagcagcggaagcaacggcagccgctaccgctagggctactgccgttgctgaagccgctaaagtttcttccgagcaatttgcagctgaggctagagcagctgccgatgccgaggctaaagccaacgctgcttcaatcattgccaacaaggcaaatgccgttttagctgaagcagcaaccggtttgtctgcgtctgctggaaaagcacaacaatcagctactagagcattacaggcagctagagctgccgccaaggcacaagctgagcttacacaaaaggctgcacagatacttgttcttatcgcagaggcaaaggctgctgtatctcgtgcctcggccgatcaatctgtgtgtacatcacaggcgcaggccgcatcccaaattcaaagtagagcttctgctgctgaatcagcagcttccgcccagagcgaggccaatactatcgccgcagaggcagttgctagagctgatgcagaagctgcctcccaagcacaagcttgggccgagtcattcaaaagagaactgagttccgttgtcttggaggctgaagctaatgctagtgcttctgcttcggcgggcgccctcgcctctggttctagttcaagcggtgcttcgtcaagtgcagatgcaagtgcaggagcttcctcctatggttctctaggaggttatcgccacggtggatcgttttccgaggcctctgctgcagcgtcagccgctagcagagcggaagcggca

SEQ ID NO: 2194 - DNA, 1131 bp, synthetic construct
  misc_feature 1..1131: note = Description of Artificial Sequence: Synthetic polynucleotide
  source 1..1131: mol_type = other DNA
ggtaaccttcttaaagagtctaaggcatccgcatctgcatctgccagcgcatcggctagagcttcaggtaaaaagaatttgcatgttcttccactaccgaaaaagagcgagcacggtattgtcattgataagagtgtgtttgacataaaagatgttgttctatccgctgttgacgaaattaatggtgccccaaagcttggtttgggatggaagaaagtctctatgggtgtggagagagccgaggctaatgctgctgccgccgctgaagctctggctatgataaaaaagatcgcaatggccagatcctctgcctatgttcaggcagcatgggcatccgctcaggcttccgctgacgcacttgcttctgcccgcgtcgctcaggcgtcgcaggaagccgctgaggcaaagggtcgcgccgcctccgaggctttgtccagagctatagaagcctcatctagagctgatgcagcagccgctgcgacattagatgctatggatagaacgatggaaaacgctagagctgccaacgctgcccaaactcaagcctctggtcaggccgaaaacgcgaatagatccgctgctgctattttagcagcattgctaagaattgccgaggcttctgccctgaataacgaggccgcagttaatgctgccgcagcagctgcagccgccagtgcattgcaagcaaaagcgaacgccgcatctcaagctaccgctcgtgctgcgggacaagcctctacagctgccgaagaggctcaatctgctcaggaggcagcagataaaaacgctgaactgactaccgttatgctggaaaaagcttcggctgatcaacaagccgcatccgcaagagcagactactatacagcttcgactgaggctgaagccgctgcacaagcctccgctatcaatgccttgagagatggaatcgtcgtcggtatgggcaacgacgctggagctagtgctcaggctatggcccaggtggaggccttagcaagagcaagcgaacacaaagcccttggcgagaagaaaaaaggtctggtatggggctacggttcgaaaggttcatcatctgcttccgcttctgcttcagcttctgccgaagcttcctctagattgggcaaggactgggga

SEQ ID NO: 2195 - DNA, 1212 bp, synthetic construct
  misc_feature 1..1212: note = Description of Artificial Sequence: Synthetic polynucleotide
  source 1..1212: mol_type = other DNA
ggttctggtcctcgccttcttggaggcaggagcgcagcttctgcatctgcttcagcgtctgcagaagcttccgcaggaggttggagaaaatccggtgcgagtgcttcagcttctgctaaagccggttcgtccaatattctaagtagagtgggcgcttccagagctgctgcaacattagttgcctcagccgcagttgaagctaaggctggattaagagctggaaaagctacggctgaagaacaacgtgaggcattggaaatgctgacgctatccgcagataagaatgctgaagcccgtattttggcagatgatacggcagtcttggtccagggttccgcagaagcacagtccgtggccgctgccaagaccgtagccgtcgaagaagagtcagcctccttagatgctgcagctgtcgaggcagaggttgctgccgcaacttctaaatcctctgccggtcaggctttacagtctgcccaaactgccgcttctgctcttcgtacttctgctaggtccgccctgactgctttaaagctagctcgtttgcaaggagccgcttcttccaacgcagcaagaatgatggagaaagcattggccgctacacaggacgcaaacgcagctgcccagcaagctatggcagctgaatccgctgctgcagaggccgccgccattgccgctgctaagcagtcagaggctcgtgatgctggagctgaagctaaagctgccatggctgctcttatcactgctcaaagaaacctggtccaggccaacgcacgtgctgagatggcttctgaggaggccgaacttgactcaaagagcagagctagcgacgcgaaggttaatgctgtagctcgtgcggccagcaaaagctctatcagaagggatgagcttatcgagatcggtgccgaattcggaaaagcatctggtgaggtcatctccactggaacaagatcaaatggtggccaagacgctattgctacggcagaggctagttcctcagcttccgccgtaggtattaaaaagacttctggtcattggggtagcggtaaatggagtcgtgtttctaaaggaaagggatgggcttcctcgaatgctgatgctgatgcgtcatcctccagcattattatcggcggactaaaaaggggtggcctgggatctgaggctagtgctgccgcttcagctgaagctgaagcctccgctggaacgttgctttta

SEQ ID NO: 2196 - DNA, 1272 bp, synthetic construct
  misc_feature 1..1272: note = Description of Artificial Sequence: Synthetic polynucleotide
  source 1..1272: mol_type = other DNA
ggtagtgaacttgagtcggaagcttccgctgctgcttctgcccaggccgaggcctcatcctcgggaagatcaggtaaactgtcggcttcacaggcctctgccagtgcttccgcatccgctagcgctggatctagaggtggatctaaaggtggatggggtcaattacgacgtggagacgtgaaatctgaagctaagtccgctgccgctattgcagtcgagggagccaagatcggaactggaattggaaatactgctagtgcctccgctgaagctctgtctcgtggtctaggcattggacaagccgctgcagaggctcaagctgctgcagctggtcaggcagaagttgccgccaagtcttgcgaattggctgacaaaactactgccaaagccgtcgctatggttgaagccgctgccgaagctgagattgaggttgccaatcaagaggtggctgcggttaagttaagtacgtgggctgctaaggcagcaagaattgttgaggaagattctgctgcagttagagccgccgctggcaagttgttgctcgcagccagggctgcagcagctgctgaaagaagggccaacgaagaaagtgaagcagcaaacgaattagctcaagcttctagcgccgctgcggctgaggctgaagctaaggcaaacgctggaagagaggccgctgccgcagctttggctattgccgaagccgctgttgccattgaacaagaggctgttattctggcaagaaaggcccaggatgctagactaaatgccgaagctgctgccgctgctgctatgaacgcacgtgtaatagcttctgctgagagtgaggcaagtgaggatttggaaaatagagcatccgttgctagagcatctgcagcaggcgccgctgaggctaaggcaattgccaccgatgctggcgcaacggcagagatcgctgcctattcatgggccaaaaaaggagagttaatcaacccaggtccattgcctaaaataatttccgtcaacgctgacctttcaaagtcagaagtcgaggctatgaaaataacccgtggacaagtacaagaagtcaaaaagatttcaacgcataagggtggatggggatggggtaaggagggtagatccaaggtttcatcaaacgcttcagctagagcttccgcttctgccaacgcggctgcaggttcattgggatcaaagtggggtcgtcagttgagtgcttcctctgcctctgctgacgctaatgctgaagctgactctcaactgctcaaagtttgggga

SEQ ID NO: 2197 - DNA, 1179 bp, synthetic construct
  misc_feature 1..1179: note = Description of Artificial Sequence: Synthetic polynucleotide
  source 1..1179: mol_type = other DNA
ggtcgggtgattgagtcctcgtcctctgcctcggcccaagctagtgccagtgccggttctagaggccttttgggtaaaagaccaatcggtaagttggaatggggaaaggaggagaaaaagctcgaagagttggatgaggaatctttaaatgaggccgccttgaaggtaggtatcaagaacggcggccttgatgttgccaaaggcgctgccgtactggaagctgctatgtctgatgtagctacactaaccgatcagagatctcttgtcgatctgggacttggcccagtagctaacgaggccgaaatacttgctgaggcccaagctgcaacatccgcacaggctggtgctgttgcaaactctgctgctgaacgtgcaatcgctgctatggagatggctgataggacggaatatattgcagctcttgttacgactaaggctgcaaaagcggctgaagctacgatggcagcaacagccagagctacagcagctgcttcagcttccaaaatttccagccaagaatctgccgccagtgctgctaacgctgctaatgccgaggccaaggctaatgctgcctctattattgctaataaggctaacgctgtcctggctgaagcagctgcagtcttggctgccactgccgcaaaggctaaagagtccgccatgaaatcgctttctgctgcccaggccgctgctaaggcacaggctagaaacgcggaagcatctgctgaggctcagattaagttatctcaagctcgcgcggctgtcgctcgtgcagccgctgatcaagccgtttgctctagccaagcacaggccgcatcacagatccaatctcgcgcatcagcatcagagtcggctgcctctgcacaatccgaaactaacacggctgctgcagaggccgttgctactgctgacgccgaggctgcagctcaggccgaagcttgggttatgtcattaaaaaatgatctttggttgcaccttaatatgaagggtgaagctaaagcagagggcgaagccgtttcgatctcaaaaggacatcgtggtggaattagaagtggatcaatctcggaggcttcagcagaagcatcctcgaatgtttcaatgggaggacgacatggaagaaaagatctagtctcagaggccttggccggcgcttccgctggatcaagtgcggattcccta

SEQ ID NO: 2198 - DNA, 939 bp, synthetic construct
  misc_feature 1..939: note = Description of Artificial Sequence: Synthetic polynucleotide
  source 1..939: mol_type = other DNA
ggttcagtcgagttgggcgccccaaagcaagaatcggtacttgttgagcaattgcttttgaagaatgtggaaacctccgccaaacgcaaagaaaatggagccccaaagttaggcgagtccacggctgctgcacttgcctctaccaaggcaactgctgcagccgaagctaaggccagcgccaaagtgaaggcttctgctttggccttggctgaagctttcttgagagcttcagctgcgttcgccgctgctagcgcaaaggctgcagctgccgttaaagaggctacccaagcccaacttttggcacaagaaaaggcgttaattgcccttaaaacacaatcggagcaacaagccgcatctgcgagagctgatgccgccgccgctgctgctgtttctgctctagagcgcgctcaagcatcttcaagagccgccaccactgctcaagatatcagctctgatctcgaaaagagagtggctacttctgcagcagctgaagctggagctacacttagagcagaacaatccgctgcacaatctaagtggtcagcagccttggcagcacagacagccgctgctgccgctgcaattgaagccaaagctacagcttcgtctgaatctacagctgccgctaccagtaaggcggctgtattgactgctgatacctcaagcgctgaggctgcggctgccgctgaagctcaatcagcttcaagaatagcaggaactgcagcaacagagggatctgctaactgggcctcagaaaacagtagaacagcccaactggaagcctctgccagtgctaaagctaccgcggctgctgcagtaggagatggagcaatcatcggtttggctagagatgcaagtgctgcagctcaagccgctgctgaagtcaaggcactagcagaagcttctgcttcgcttggtgcttctgaaaaagataagaaa

SEQ ID NO: 2199 - DNA, 924 bp, synthetic construct
  misc_feature 1..924: note = Description of Artificial Sequence: Synthetic polynucleotide
  source 1..924: mol_type = other DNA
ggtcagagttctccattattagagattgttcaaggaagcgccagtgctaccgcttccacggctgtgactgctagatctggtctgagagctggccaagtggctgtagcttcacagaaggatgccactctgcaggcagacgcttctgccgccgcagctgctgctgccagagcctcagctgaccagtccgcctcattagctcagcaatccgcctctcttcaatctaaggctgccgcacgtgctaaaagtgcagaagagtctgctgccgctaccgccaaagctgagttgcaggcagaatctatagctgcttcagcttcttcaaatgcacgtgaagcagctgcgtccgccaaggctagcgcctctgccatgtctagtgctgctgtccaagccaaattggctgaaaagacagccaaaaaccaagccttggcgtcagaggaagccaaacttaaggcggccgctgcagcttctgctgcagctgcagctagcgccgccgccgaggccgctcttaaagctgagagaattgccgaagaagccattgctaaagctgccgctgcaaaggctgctgctagagcagctgcagcagccttgaattctgctaaagaggctgcaacctcgtctgccaggtcagcagctgaagccgaggctaaatccgaagtcgctatattgatctcagaattggacaagaagtcacgagaggtagctgcctctgcgtcggcaaaagctagagcagccgctgccgcttcctcgcgtaatgcagaaaccgcggttatcggcgcaaatatcaatgtcgcaaaagaggtgcttgcaattccaattgagcctaaaaagttgccagagcctgagttggctcttaaagaagaaaatgttgccgttgcatcttctgagagcgaagttaaggttgaaacatcttctgaagcttggtctata

SEQ ID NO: 2200 - DNA, 1014 bp, synthetic construct
  misc_feature 1..1014: note = Description of Artificial Sequence: Synthetic polynucleotide
  source 1..1014: mol_type = other DNA
ggtaaacctctgattgctaatgcccaaataggtaaggtcaagaccgagacgtcctcttcatcggagatagaaactttggtttcaggaagtcaaacattagtcgccggatctgaaaccctggcttccgagtccgaagcccttgcctctaagtcagaagctcttacctctgaggccgagatcgcttctgtcacaactaaagatgaacttattctaaagggtgaagccatcacaggcaaaaagttgggtacaggtgcatctgaagttgctgccgcttccggtgaggccattgctaccaccttaggtgcaggtcaggcagcagccgaagcccaagctgcagccgcagctcaggcgaaaagtgcagcggcagcagctgctaatgcaggagaaagttccaacagcgcagccgccttggttgcggctgctgcagctgcccagggtaaggctgctgccgcagcggctgcagctactaaggcatccttggaggcagccgatgctgcagaagaagccgaaagcgctgttgccttagctagagctgcttcagctaaagccgaagctttggcctctacagcagctgctgctaatactagagcggctttacaagctgaaaaatctaacgagttggctcaggcagaagccgctgccgccgccgaggcgcaagccaaagctgcagctgcggccaaggctactcagctcgcattgaaggtcgcagaaaccgctgttaagactgaagctgatgctgccgccgcagctgtcgctgctgccaaggcacgagctgtggctgatgctgctgcttcccgtgctacagctgttaatgctatcgctgaagcagaggagagagattctgctcaagcagagaatacggctggagtagctcaggctgcccttgctgccgcagaggcacaagatagctgtattggagcagctgctactcctaggcactcttcttcttatgcttggtggaaattacgcattacctcactcatagtcattctgagccctcgaaacaggagaaca

SEQ ID NO: 2201 - DNA, 885 bp, synthetic construct
  misc_feature 1..885: note = Description of Artificial Sequence: Synthetic polynucleotide
  source 1..885: mol_type = other DNA
ggtcatgttgtgaaaagagataaggagcttaaggctccagctcttccagagttactgggagacggatcagacactttaggtgctagtatggagaatggtattaaagttgctagagccagccaaaacgttggactacgtactgagttaaatgctgccgcaagagcagcagccgccgccgctaccaagcaagcaaaagacactgaggctgctgaagctggtgcagccgcagctattgcaatcgccattgccaaacgagaggaagctatcaaagcaagcgaattggcgtctaaacttttgactgccgcagctggttcgtcagaggctgctgtatctgccactgttagagctgctcagttgaccgctgctgcttctgccgctgccaaggctagtgctagtgcttcagaagcttccgccgaagcccaggttagagctaacgccgaagctaatattgcaaaaaaggcctcggccgctgaagccaaggccgcagcagaggctcaagtcaaagccgaattagccaaaaaggccgccgcgggtttcttagctaaagctcggttggctgcctctgcggaatccgaagcaacaaagctcgcagcagaagccgaagttgccttggccaaggcaagagttgctgtcgatcaatcccaatcagctcaagcaaccgccactgctcaggctgctaccgccgttcagttgcaaagtcaggccgctaacgcggaggccagtgctgttgctcaagcagagactttgctcgttacagcagaagcagtcagtgctgctgaggcggaggccgctacaaaggctacgtcatggggcgaggaatgtcatcaaagagaaaaagtcacatttagcgaagatagattgaatgaaagacaagataattgggga

SEQ ID NO: 2202 - DNA, 1464 bp, synthetic construct
  misc_feature 1..1464: note = Description of Artificial Sequence: Synthetic polynucleotide
  source 1..1464: mol_type = other DNA
ggtgacagatcttgggcagctagtgatgcaaatgctgaagcttctgctgctgttgagtctccttctctctgggaggactcaagttcagcttctgccggagcatcaaatgcggcagaaagctcaagcctctgggaagattctagttcggagaataccggagcctctaccgccgctgagagttcttccttgtgggaggattcaagttctgccagtgccagagcgagcacagcagctggttcgtcaagtgcgtgggaagattcttctataaccaacgcgagagagtctggtgcttcgggttcactctcatcctgggaagattcatcttcagcatctgcttcttcctccaccagtgctagtgcttctagttcctccagtagttcttcctcgatttcttcttcagccagtagcagctcatctgccagtgcaagcgccagtacagaggcctctaatgagtcaagaaggggcattgctatcgaaggagctttggttggtacgggtgctgcgagtacggctgcagccagtgcggagatgttgagcgacacattgggacttggtcaaagcgctttacaggctcagacagcatcagtcacgcaagctaatattgcatctgacgcttcgaaccaggccaatcgcttggctgccgccgctgccgccgctatgtctgccgcagcctcagcacaagagaatgctgctagcctagcaagagcttcggcatccgcctctgaaagcgctgcttcagcatcttcaaaggcagaagcatctgccgaggcagcaaagtctagtgccgaaaagtgtcttttacttgctcagaactcagctcaagctcaagccagagctactgagcaaagcgagtcatctaatcgtgattctgcagcaaacgccgcagctgcagcagaggcagaacgtaaagcaacactcgcactgaaagctattgctgatgctaaggctaaggctggagttgccgtagccgcccaatctgaagcagccgcagcagcagccgctgctgccaaggctagagctgatgctgaagccggagcaaacctagctgcagctgcaagagctgtggctgccgctgaggccgctgccagtcggcgaaatgaccgtcaagccggtattgcacaagcaggagcttctgcagctgcagagacaagggcattagcttcttccgccgctgccactgctaaagccgccgcttacgcgaatgccgatatccgtgcactaagtgctgcggctttagagtcctctatctcaagttcttcctcaacttccgcttctagcgcttcctcgtctgcttcctccggagccagtagtgactcctcatccggagcaagtagtggagcctcttctgactcttcctcgaattcctcttctgattcatctagtttgcttggtgatgatgcttccacaagcgcttcatccaccgcagaggccgaatcccgaacctcttctcttattcttaatgga

SEQ ID NO: 2203 - DNA, 972 bp, synthetic construct
  misc_feature 1..972: note = Description of Artificial Sequence: Synthetic polynucleotide
  source 1..972: mol_type = other DNA
ggtaaaagagctcgaagaagctctaacgccgaggcatctgctgccacttctacttcgtcacaagccgactcaggtaagaacaaggatgcctgcgcttctgacgccattgccggtgcagctgccagtgcttcttcccaagcatctatcctcggtaagagagcaagaagaagctctaatgcagaggccagtgctgcaacaagtacatcatctcaagctgactcaggtaaaaataaggatgcttgtgcatctgacgcaatagccggagctgctgcttcggcttcatcacaagctgattccggtaaaaacaaagacgcttgtgcctcggatgcaattgctggtgctgctgcctcggcttcatctcaagcctctagtttgggaaaaagagtcagacgttcttctaacgccgaagcatccgcagctacgtctacaagttcccaagctgactccggcaagaatacggatgcttctgcgagtgatgctattgttagtgtagccgcctccgtttcttcgcaggctgacagcggaaaaggtaagtccgcaggagaatccaatgcagaagcctctgcggccgcgtccgcgtcctctcaggctgactctggaaagggcaagagcgccagtgaatccaatgctgaagcctccgctgctgcatctacttcctctcaagcagatagaggtaaagacaaggatgctagtgcttcgaacgctgaggccagcgctattgcctctacttcgtctcaagctggaagtggtaagggcaaaagcacttctgaaagtaatgctgaaacgtccgctgctgcgtccgcttcttctcaagctaacacgggaaaagataagtcaacaagtgacagtaacgctgaagctagtgcagcagcttccgcttccagtcaggcagatagaggcaagggcaaagatgcttccgaaagtaatgcagcggcctgggctgcatctgcttcttcccaatctgataactca

SEQ ID NO: 2204 - DNA, 480 bp, synthetic construct
  misc_feature 1..480: note = Description of Artificial Sequence: Synthetic polynucleotide
  source 1..480: mol_type = other DNA
ggtgcatcaaacgccgctgaatcttcctctctatgggaggattctagttcggaaaatactggagcttcgacagcagccgaaagttccagtctttgggaggattcctcctccgcctctgctagagcttccactgcagcaggaagtagttcagcttgggaggactcctctatcaccaatgctagagagtccggagcatctggatctctcagttcttgggaggattcgagttccgcttcagcaggcgcttcaaacgctgctgaatcgtcatcgttgtgggaggactcttcatctgaaaatacaggagctagtacagctgcagagtcctcatcactttgggaagattccagttctgcttccgcacgagccagcaccgccgctggtagttcttccgcttgggaggattcttctattactaatgcaagagaatctggagcaagtggctcgctgtcaagttgggaggatagttctagtgcatccgca

SEQ ID NO: 2205 - DNA, 837 bp, synthetic construct
  misc_feature 1..837: note = Description of Artificial Sequence: Synthetic polynucleotide
  source 1..837: mol_type = other DNA
ggtatagcgattgagggagctttggttggtacaggtgcagcctctacagctgccgctagcgctgaaatgttatctgacacattgggtttgggtcaaagcgcccttcaagctcaaacggcatcagttactcaggccaatattgcttccgatgcatctaaccaggccaacagattggcagctgctgcagccgcagctatgagcgcggctgcctctgctcaggaaaatgccgcctccttggctagagcatccgcttctgctagtgagtctgccgccagcgcttcgtcaaaggcagaggcttctgccgaagccgctaaatcatccgcagagaaatgtttgctgctagcacaaaattcagcccaggctcaggcaagagctacagaacaaagcgaatcttcaaacagggattcagctgctaatgctgcagcagccgctgaagctgagagaaaagcaacactcgctttgaaggccattgctgatgctaaggctaaggccggagttgctgttgctgcgcaatctgaagccgctgcagcagcggcggctgccgctaaggctagagccgatgccgaagctggcgctaatctggcggctgcagctagggccgtggcggccgctgaggctgctgcctctagacgaaatgaccgtcaagctggcatagcacaagccggcgcttccgcagccgcagaaactagagcgctagcctcttctgctgctgccactgcaaaggccgctgcttatgcaaatgctgatatacgcgccttgtctgctgcggctctagagtcctctatttcatcttcttcctcgacttcggcatcctctgctagtagcagtgcatcttca

SEQ ID NO: 2206 - DNA, 1065 bp, synthetic construct
  misc_feature 1..1065: note = Description of Artificial Sequence: Synthetic polynucleotide
  source 1..1065: mol_type = other DNA
ggttcatctagttcctccgccgagtcctctgcctcggccactgcatcatcggatgcaagttggtctgcctctagtagaagttcggctactggtagagcacctaatgttatcttgaaccgagccccacagctaggagctagcgctgctgctattgcgagtgcacgtgcatcaactagtgctaatgctgcatctgatgagaagtctgcccgtgaaacccgtgctactgccttggctagatccagagctgctgtaactgcagccgcaagggcagcagctaggacgcaggaggcagtagccgctgcgaaggcagccagcagagctcaagctcttgctgctgccaagtcgagcgcggctatctcggccttagctgccggtgaagccgcagcacaaaaggccgatgctgctgcgttggccgctttggctgctaatcaaagatcagtaaaagctgctgaaaacggattggctgtacagaacagagctaacggagaggctgagcaggcgtcaagagctgcagctgccaacttggctgcagctattagaactagagataatgctttggaaacaagaagggaagctgcaaggttaaaagctctagctaccgccgctgccaacgcaaataataaggctacttctctagctgaagcctctgcaaaccaggcagctgaggcctcctcagcggcggaggatacttcatctgctcaaagcgcagcagttgcccaagcggaagctgcagaaacattgaatgtgaatttggccattctagagtccacccaaagcagtcgtcaggactcaaatgttgcgaaggcggaggcctccgcagcagcaaaagcatcccctggaaccgccaccagagatggcgtaaacttgggactggcctccgacgctggcgctgctgcacaattgaaagcccaagccgctgcactggctagagctagctctagaatcagttctggtccagcactatctgcttggaaatggagaaatgaagattcctcagaatctagcacttccgctatcgcttcgtcgtccgcttctagttcgagttcatctagatctgcttcagga

SEQ ID NO: 2207 - DNA, 1377 bp, synthetic construct
  misc_feature 1..1377: note = Description of Artificial Sequence: Synthetic polynucleotide
  source 1..1377: mol_type = other DNA
ggtgctgagagttcttcttccagtagtgcagcctcttctgcatcatcaagcagctccgagagtcgaggtcaacttttgcttcctttagaaagatccagcactagatcattgttagaccttgttagctctgcccgatccaacactgctataacagcttcaagcgctgctgccgccaaagctactttacgtgctatcaaggctgcaaattccgctcaaggtgaagctttagcacaagccactgccagtgctgcttcaaatgcaaaagcacgtgctactgccgcagctgcagctcaggcaacaaatgctgcggttaacgctcaaggtaaggccagcgcacaagcaatagctaccgctgaagcagctgaagctttgacgaaatccgcattacaagctcagagcgctgcttcctcatcgaaatctgaggctgctcaagcctccacgtcagccaatgcaggcgctggtgcattggccactgcttccgctcaggccttgtccgccaagaaggccgccctcgcttatgcttccgctgcagcagatgcttctaccgcagctgctaaagcaagagctgcagtggctgccgctgaagccgctacacgtaccgctgtccaagctgaaagagactccacaaacgctgcctcccttgcagctaaggcacaggccgaagccagagctgccgccgcagccgcagctgctgctagattagccgcttcagcagctgctgacgcttctgcccaagctgatgcaagggtccgtacagcttccattgaagctgccgcatcagcgcgtacgaaagcttccaatgcgcaggcgacagctgaggcggctgcaatcgctagatccagtagtagagacgctcaagctaactgggtggataataggtcctcagctagctcctcctcagccagcgcttctgcctcggtgtcagcttctgctagcggagaggcagattcagaggccgacagtgatgcttcagcctcagctagaagtgcagctgactccaatgccggctcaagttcaggtctggctgccgactctgctgcagacactgctgcaggatcaactgccggttctgcggctcgtttatctgccggatcagccgctggctccatagcgagaagcgcagctggttctactgctggctcatcaacaggcagtggtgctggagcatctgctgaaggctccagtaacgcatcttcgggcacttccgcaggagcttcatcaggtgctagtactggagcatccgctggagcttctgctaccgcgagtgccgataactcagctgataattctgctgaggcactttccagttcgtcagctgaaagctctagctcctcttggtcatcttcatctcaaaacatttggtcccaagactgggga

SEQ ID NO: 2208 - DNA, 1062 bp, synthetic construct
  misc_feature 1..1062: note = Description of Artificial Sequence: Synthetic polynucleotide
  source 1..1062: mol_type = other DNA
ggtccatcaaggttgtcggaaacttcggacagctcggccgcctcctggtcatctagttctagttcttcttccagtttgtcctcttctctcgcaagcgattctgcttcctcttcagcttctggatccgcaagtgcatccgctagtgcttctgcttcagcttccgcaagcagcagaaatgataactccagagtaaaggcatggaagaagggaaggggtggttccgatagcctggtcctatcatccgacagttccgaggatagtaaggctagagagcttttagaaactgacgcaggtttgggtgctgccgccgcgcttgcaagagctactgccgatgcacaggcacgaactgctgctagtgctgatgctactgctaacaaagctactgctaaggcattggttttagcagaagcagctgttagggctgaaaacgcggctattgtccgtatccgtagggctttgtctgctgctcaagcactcgtctccgctagcaatcgagccaaagccgccgcaagggcagcaagagaagctgcagctaacagtgctgcagccgccgctaaagcctctaccaatcaagtcaaagcaaacgcagacagtttggtagccaacagagctgctgctgctttactggctgcagccgaagaagcactgcagaaggcttctgcgtcccagaacgcagccgcagaggctgctgcgaaagctagagccgctgctaatgcgaatgcagctactacacgagccgctgcttcggccatcttggccgaggcccgtgcacgtactgctataacgaaggcattagctgctcaatctacggcttccgcacaagcatccagcgcctctcaagtccaaaacagagctaacaatttgcaagctgagactgctagcttggctcaatcaagagccgaggccgctatcgcggcagcagccgctcaggctgcagctcttgctgaagcaaatgctcagttggcaagattgagtaaggcttcagcaggagcttctagtgagggttctgctagtgcatcggcctcagcatctgccagtgcttcatcctcctcctcttcagca

SEQ ID NO: 2209 - DNA, 972 bp, synthetic construct
  misc_feature 1..972: note = Description of Artificial Sequence: Synthetic polynucleotide
  source 1..972: mol_type = other DNA
ggtgctcgtgaagaagtggagactagagacaagactaagacatctaccgttgttaaaagtgaaaaggttgaagtagttgctcccgctaaagatgaattgaaacttacttccgaacctatctttggacgtagagtcggaaccggtgcttccgaagtagcctcgtcctctggagaggctatcgctatatctcttggagctggacagtctgctgcagaatcacaagcgttagctgcctcacagtcaaagaccgcagccaacgccgcaatcggtgcttctgaacttactaacaaggtagcagccttagtcgctggtgctactggtgctcaggctcgtgccactgctgctagctcctctgccttgaaagcttccttggctactgaagaagctgccgaggaggctgaagccgctgttgccgatgccaaagccgccgctgaaaaggctgagtcactagctaaaaacctagcttcggcctcagctagagccgctctcagttcagagagagctaatgaacttgcccaagctgaatccgcagcagctgcggaggcccaagccaagactgccgctgctgcaaaggcagccgaaattgccttaaaggtggctgagattgctgtaaaggctgaggcggatgccgcagccgctgccgtggctgctgctaaagccagagccgttgcggacgccgctgctgccagagcagcagccgttaacgctattgccaaggccgaagaggaggcttctgctcaggcagagaacgctgcaggcgtcttacaagccgctgcctccgctgctgctgaatcccgtgctgccgccgctgcagctgctgccacttctgaggcagctgctgaagcaggtccacttgctggcgagatgaagcctccgcactggaaatgggagagaattccagtcaaaaaagaggagtggaaaacttcaactaaggaggaatggaaaaccactaacgaagagtgggaagttaaa

SEQ ID NO: 2210 - DNA, 873 bp, synthetic construct
  misc_feature 1..873: note = Description of Artificial Sequence: Synthetic polynucleotide
  source 1..873: mol_type = other DNA
ggtagagtcataaatcacgaatcccttaaaacgtctgaagatattcaaggtggttattctgctggaattgtaggtgatggttcggacgccctgggtagttctattgagaatgctcaaaaggtggcacgtgccgctgaaaacgtaggcttgaatcttgaactgggtgctggtgcgcgtgccgccagcgttgccgccgcggctcaggcaaagaatacggaagctgctgaagctggtgctaacgcggcgcttgctgccgccattgcaaaacgtgaagaagctattaaggcctctgagatagcgaatcagttattgactaacgcagctaaggccgccgaggctacagtaagtgcaactaaacgcgctgctcaattaactgcagctgcaaaggaggctacccgtgcctcagctgctgccgcagaggcagctactgaggcacaagttaaagctaatgctgattcgatcatcactaaacgtgcagcaatcgcagaggctcaagccgcggcagaggcccaagtgaaagccgcgatcgctagaaagtccgccgctaactttcttgctaaagcacaaattgcagcagctgctgagtccgaggcaaccaagttggctgcagaggctgtcgttgcccttacaaatgccgaggttgctgtcaatcaggcccggaatgctcaagcaaacgcgagtactcaggctagtatggccgtgagagttgactcccaggctgcaaacgcggaggccgcagcggtagctcaagccgaaactcttttggttactgctgaggcggtagccgcagccgaagctgaagtggccaacaaagctgcaacctttgccaagcagatagtaaacgaaaagaagattcatgttgccaaattagaa

SEQ ID NO: 2211 - DNA, 951 bp, synthetic construct
  misc_feature 1..951: note = Description of Artificial Sequence: Synthetic polynucleotide
  source 1..951: mol_type = other DNA
ggtgtagaggagtttaaaagctctgcaactgaggaagtcatttcaaagaacttggaagtggatcttctgaagaatgttgatacatccgctaagagacgcgagaacggtgctcctgttttgggaaaaaataccctccaatctttggagaagattaagacatctgcctcagtgaacgcaaaggctgccgcagttgtgaaggcctcggcgttagctcttgctgaggcttatctgcgggcatcagccctgagcgctgctgcttcagccaaggccgctgccgctctgaaaaatgctcagcaagctcaattaaatgctcaagagaagtctttggcagccctgaaagcacaaagtgaagaagaggctgcctccgctagagccaatgctgcaacagcagccacccaaagcgccttggaaagggcacaagcttcttcccgtttggcaactgtagctcaaaacgtggccagtgatcttcagaaaagaacctctaccaaggctgctgctgaagctgcggccactttgagacaactgcaagatgccgaaagaactaagtggagtgccaacgcagctcttgaagtttctgccgctgctgctgccgctgaaaccaagaccactgccagttcggaagcagctaacgcagcagctaaaaaagctgctgctatcgcctccgatgcagatggtgcggaaagatccgcctctacagaggctcagtccgctgctaaaattgagtctgtcgccgccgcagagggtagcgctaatagtgcttctgaggactccagagctgcccagttagaggcttccaccgctgctagagcaaatgttgctgcagcagttggtgacggagctataattggactgggtgaggaggccggagctgctgctcaacttttagcacaggctaaagcattggctgaagtctctagcaaatcagagaacattgaggataagaaattctca

SEQ ID NO: 2212 - DNA, 945 bp, synthetic construct
  misc_feature 1..945: note = Description of Artificial Sequence: Synthetic polynucleotide
  source 1..945: mol_type = other DNA
ggtctggaaggaccaggaaacagtctcccagaattggtcaaaggatccgcctccgcaacagccagtaccgctgtaactgctagatctggtttgcgtgctggccaggtggcccttgcctcacaaaaagatgctgttttacaagcccaggctgcagcctcagctgcaagtgaagctcgcgccgcagccgatttgactgccaagcttagtcaggagagcgcttctgtccaatcgcaagctgcagctaagggaaaagaaaccgaagaagctgctgttggacaggctcgcgctggtcttgaatccgttagcatggctgcttccgcaacctcggccgctaaggaagctagtactgctgctaaggcggcagctagcgctttgtcaactgccgtcgtgcaagctaaaatagctgagcgagctgcgaaggctgaggcggttgcttcagatgaagcaaaggctaaggccatagctgccgccaacctcgctgcagaggcctcagttgcagcggaagccgctttaaaagctgagaaagttgctgaagaagctatcgccagagcagccagcgctaaggcagctgcacgagcagctgctgcagctttggcttctagtaaggaggctgccacagcttcagctagaaacgccgctgaaagtgaggctcgtaatgaagttgctgtattgattgcggagatcgacaaaaaatctcgtgaaatcgatgctgcttctagtttgaacgctagagcagccgctaaagcctcaagtagaaatgtcgagactgctactatcggagcaaatattaattcttcaaagcaagtggtttccatcccggttgagataaaaaaattttcagaacctgaggtttctacgtcttggagagaagatgaagaggtgaccaaggagaaaaaggagcacattaatttgaatgattttgatcttaaatctaatgtgttctca

SEQ ID NO: 2213 - DNA, 672 bp, synthetic construct
  misc_feature 1..672: note = Description of Artificial Sequence: Synthetic polynucleotide
  source 1..672: mol_type = other DNA
ggtgctaacgccaattctgactccaactccaattctaattctaatgctaactccgacgcaaacagtaactcttactccaactcgggagctaatgccaactcgaactccaattcgaattcgaatagcaacgcgaattctgatgcaaactctaactcgtattcaaacagcggtgccaatgctaattcaaattctaattcaaactcaaatagcaacgcttattccgacgccaactctaattcctattctaattcgggtgcaaacgctaattcttactctaacagtaacagtaactctaatgcaaattctgacgctaactcaaatagttactcaaatagtggtgctaacggaaacagtaattccaactctaactcaaactctaatgctaatagcgacgccaatagtaacagttacagtaattccggatccaacgccgactccaacgccaatagtgactcaaatagtaacgctaacagtgatgcaaactccaattcttatagcaatagtggagcctacgcaaattcaaacgctaattcaaattcaaatagtaacgcgaactctgacgcgaactctaattcatattcaaattcgggtgctaacgctaattcgaacagtaactccaactctaattcaaatgctaattccgacgctaactctaactcctactccaattca

SEQ ID NO: 2214 - DNA, 702 bp, synthetic construct
  misc_feature 1..702: note = Description of Artificial Sequence: Synthetic polynucleotide
  source 1..702: mol_type = other DNA
ggtgacggcagtggtagcggaagtggatcaggatcaggtagtggtagtggatctggatccggctcgggaagtggatcaggttctggtagtggaagcgattcaggatcgggatccggaagtggccatggttcctctagttcttcgtctagcggagatggatcaggtagtggttctggttccggatctggatcaggatccggttctggttccggaagtggttcaggttctggttcaggaagtggtagtggatccggtcacggatcgagttccagttcttcatcaggtgatggtagcggtagtggatccggtagtggcagcggatcaggttcaggttctggatccggctctggatccggatccggtagcgactctggttcaggctctggttcaggtcatggctcttcatcaagttcatcttcaggtgacggatctggttccggttcaggatctggatcaggttccggttcgggatctggaagtggcagcggctccggatccggatctggatccggatctggttctggacacggctcctcatctagtagctcatcaggagacggcagtggttcaggatctggcagcggcagcggatcaggaagtggttctggttcgggtagtggaagcggctcaggaagtggttcgggatccgattctggctcgggatcaggttctggtaacggctctagcagttcgagtagttca

SEQ ID NO: 2215 - DNA, 546 bp, synthetic construct
  misc_feature 1..546: note = Description of Artificial Sequence: Synthetic polynucleotide
  source 1..546: mol_type = other DNA
ggtaataatttaaatgcccaaaatatggctgcaggttctaatactcagataactgctggtaatgttataggttcagctatccagaacacagcggctggattggctgcttcagcaaacattatcaacaacggtgtaaacagaattgttactaattcaaacactaagggattagttaatactatcagcaggattaataacttgaacggaagaaacaacggagcattgggtttgaacggaaacaacttacagggccaggttcctttggtaaatggtgtgaaccaggccgtcaccaactcgaacacgcagggattggtcaacactatttcacaaatcaacaaccttaacggtggaaacaacggtgccttaggtgttaatggtaataatctgcagggtcaggttccattggtcaacggtgttaaccaggctgttactaacagtaacacccaaggtttggtcaacaccatctctcagattaacaatcttaatggaggaaacaacggcgctctgggtgtaaatggtaacaatctacagggccaagttccttta

SEQ ID NO: 2216 - DNA, 540 bp, synthetic construct
  misc_feature 1..540: note = Description of Artificial Sequence: Synthetic polynucleotide
  source 1..540: mol_type = other DNA
ggtaacaatcttaacgcccagaatatggctgctggatccaatacgcagattacggcaggaaacgtaataggcagtgccatccagaacaccgcagccggtttagctgcatctgctaatatcattaataacggcgtcaatcgaattgttactaatagcaatactaaaggtctggtgaatactatttcacggatcaataaccttaatggtaggaacaacggcgcccttggattgaacggtaacaacctacaaggacaggtccctcttgtcaacggagttaatcaagctgtgaccaacagtaatacacagggtttagtaaacactatttctcaaattaacaatttgaatggtggcaataacggagcattgggagtcaatggtaacaatttgcaaggccagttgccactcgttaacggtgtgaaccaggccgtgactaattcaaacacccagggagtggtaaacacaaatagtcaaatatcgaacctcaatggagctaacaacgttgcattgggtgttaatggaaataacttgcaagaagcccta

SEQ ID NO: 2217 - DNA, 546 bp, synthetic construct
  misc_feature 1..546: note = Description of Artificial Sequence: Synthetic polynucleotide
  source 1..546: mol_type = other DNA
ggtaatagcttgaacgctcaaaacatggctgccggctctaacacacagattacagccggcaacgtaattggttccgcaatacaaaatactgctgccggactggcagcctcagctaacattatcaataacggtgtcaatagaatcgttaccaattccaatacgaagggtttggttaatacaatctctagaataaacaaccttaacggcggtaataacggtgccgttggactaaacggcaacaacctacaaggccaggttcctctggtcaatggtgtaaaccaagcagtaaccaactctaacactcaaggattagttaatactatctcccaaatcaacaacttgaacggaggaaataatggcgccctcggtgttaatggtaataatttacagggtcaagtgcctctcgtgaacggtgtgaaccaagccgttacgaattcaaacacccaaggactagttaatacaattagtcagatcaacaagttgaatggtggcaacaacggagctttgggtgtgaacgttaacaatctccaaggtcaagtccctcta

SEQ ID NO: 2218 - DNA, 1218 bp, synthetic construct
  misc_feature 1..1218: note = Description of Artificial Sequence: Synthetic polynucleotide
  source 1..1218: mol_type = other DNA
ggtagaccatcgggagacgacgacgtccgaattatttcttcgaccaaggacgttacttctactggaaagagaagatcaaactctaagaacaatgtcgctcaatcttcctctcaaaaggacagtatccgggtaaaggactcaaatgaagtcattaaatccatctccgaaaatgatcctgacggtacgcgtattactacctcaaagggtacaggagtcggttctgaaacattgaatgaaaatttggttgagttgaatcaaaatacagtatcagacaccaactctgtcgaaacttcctccgataaatctaacagtgtgactacttacgacgctgatgatagaccgctgaccgtcaccgacagaaaaggccaaaaggatgtgaagtccgccactaatgctaaggaagatagttcggaagtgtcagaaaattctgaatctgaaaccaattggcaatcagagtctgactctgttgaaaagtcggtatcacatccagtttgcggaggagctgagtccccatcgagtggtggaccacagggatctggccctcaaggtggaggttcccaaggtggaccatcaggtcagggacaacctaacggcggcatagctgtttcaagcgctgaggacgccgccgccccacagtcaactcgtacgtcaactgcagagggtgaatcgtcgtcctttagtgctgccgcagatgttaatgaaggttctagaaagggcaatgtagctctggctggaagtaccgcttacggtcgttcggtcaccaatgaaaactcctcttctggttctacacaaagtttttcaggtgccgcagaagaaaacgtcgcttcacctgacggtggtagtacccaaagaaatgctgctatcgctggtaatattgcagagggacaagtctcttcaaaagaagaggtggccgaaggtaaggctacctctttatcaggtactatccaagaaagtgacgaaaactcacaacgtagcgccgctattgccggttcctcggccgaagctaacgttgctacacgagagcagacctctaaaggtaagacagccgcttggactggaaactctcaagaaaagtctacttcgccagcagagatttcagagactaacattttctcctctggttcctatgctgagggatctactttatcaagagaaaagttggaacagggtaaatctacaacatggtccgaagaatctgaagagtcccgtaaacacgga

SEQ ID NO: 2219 - DNA, 570 bp, synthetic construct
  misc_feature 1..570: note = Description of Artificial Sequence: Synthetic polynucleotide
  source 1..570: mol_type = other DNA
ggtgcagttgccggtggtgttgctggagcttcgtcgaaggcctccggtaacgaaggtagtggtgctgcttccggtgctaaaaccgtttctgtagcaggcacggacggttccggtggtgccttggctggttcagctgccggagctatttcgaaggcttcaggtgacgaaggttcaggagcagcatccggagctaagaccgtatcggtcgctggtaccgatggcagtgaaggagccgtagccgtaggtgttgcaggagcctcgtccaaagcttccggaaacgaaggttcgggagcagcttctggcgcaaaaactgtgagtgttgccggtaccgatggttctggaggagcccatgccggctctgccgctggagcttcttcaaaagcttccggagacgagggtagcggtgctgcctccggtgcaaagacagtatccgtggctggtactgatggttcaggaggtgctcttgctggcggcgctgccggtgcttctagcgaggcgtcgggtgatgaaggatcaggcgcagcatctggagcaaaagctgtttctgtagctggaacagatggctccgga

SEQ ID NO: 2220 - DNA, 423 bp, synthetic construct
  misc_feature 1..423: note = Description of Artificial Sequence: Synthetic polynucleotide
  source 1..423: mol_type = other DNA
ggttctagcggaagaggattgggtggatacgatggttcggtcgacggaggatacggttccggcagtggttccgccgctgcagcagccgccgccgctgccgcaggatcctctggtcgtggtattggtggatatgacggattcgtagatggaggatatggttcaggaagtggatcggcggcagcagcagcagctgcagctgccgcagcagcaggatccagcggaacaggtttcggcggatatgatggttttggcgacggtggatacggttctggctcaagtgccgcggcggctgctgcagctgctgccgcagccgctggttcttcaggaagaggtttgggaggatatgatggttgggtagatgacggttacggttccggatcgggatctgccgcagcagctgccgctgccgcagctgccgctgca

SEQ ID NO: 2221 - DNA, 426 bp, synthetic construct
  misc_feature 1..426: note = Description of Artificial Sequence: Synthetic polynucleotide
  source 1..426: mol_type = other DNA
ggtaataatctgcatcatcatgatgaatacgttgacaaccatggtcagttggtcgagagatttactactaggaagcattatgaacgtaatgctgctactcgtccacacctttctggaaacgaaagactcgtcgagactatcgttttagaagaggacccatacggccacgaggatatttacgaggaggacgtagttataaacagagttcccggagcttcatcatcagctgcagcagcctcctctgcttccgctggttctggacaaactattattgtggaaagacaggcaagccacggagctggaggtgcggctggtgctgccgctggagctgcggccggttcctctgccagaggtggaagtggtttttatgagactcacgattcttactcctcctacggatcgggctcatcaagcgctgccgccgca

SEQ ID NO: 2222 - DNA, 402 bp, synthetic construct
  misc_feature 1..402: note = Description of Artificial Sequence: Synthetic polynucleotide
  source 1..402: mol_type = other DNA
ggtagcggtgctggaggtgtgggtggtggatatggtggtggtgacggaggctatggatcgggctcatccgcagctgctgccgccgcagctgccgctgcggctgctagcagacgtgctggtcacgaccgtgcatacggtgcgggttccgctgccgccgctgcagctgcagccgcagctggtgcaggagcttctaggccagtaggtatctatggtaccgatgatggattcgttctggatggaggatatgactcggaaggctctgcagctgcagctgctgctgctgcagccgctgctgcatcatcatctggcagatctaccgaaggacaccctttactttcaatttgttgtcgtccatgctcacatagacatagctacgaggccagcagaatcagtgtacacgga

SEQ ID NO: 2223 - DNA, 558 bp, synthetic construct
  misc_feature 1..558: note = Description of Artificial Sequence: Synthetic polynucleotide
  source 1..558: mol_type = other DNA
ggttctggagctggtagagctggtggtgattacggatggggcgacggtggttatggatcggattcggctgcagcggccgctgcggctgcagctgccgcatctggagctggcggaagcggtggcggatacggttggggcgacggtggatatggatccgattcagctgctgctgctgctgcggccgccgctgctgcatccggagcaggaggctctggaggaggatatggttggggagatggaggatacggttccgactccgccgctgcagccgcagcagcagcagcagctgctgcaggaagtggagcaggaggtagaggtgatggcggatatggaagtggctcttctgccgcagctgcagcagccgcagcggccgcagccgctgcaagacaagctggtcatgagagggccgctggtagcgctgcagctgcagcagctgccgccgcagcagctgccgcttctggtgctggaggtagcggacgtggttacggctggggtgacggcggttatggatccgactctgctgcagctgctgctgccgcagctgctgccgctgccgca

SEQ ID NO: 2224 - DNA, 459 bp, synthetic construct
  misc_feature 1..459: note = Description of Artificial Sequence: Synthetic polynucleotide
  source 1..459: mol_type = other DNA
ggttctggtgctggtggcgcaggaggtgattacggatggggagatggaggatatggaagtgattcagccgcagccgccgccgctgctgcagcagccgcatcaggtgctggaggagccggaggtggatacggatggggagacggtggttatggatctgactccgcggcagccgcagcagctgcagcagctgcagctgccggctccggcgctggaggtaggggtgatggaggttacggatcaggatctagtgcggcggctgcggccgctgcagccgctgccgctgccagaagagcaggacatgaccgtgcagcaggtagcgcagctgccgctgctgctgcagctgctgccgctgctgcatctggagctggcggttcaggaggcggatatggttggggagacggaggttacggtagtgattccgctgccgccgctgctgccgctgcggcagctgctgctgca

SEQ ID NO: 2225 - DNA, 1041 bp, synthetic construct
  misc_feature 1..1041: note = Description of Artificial Sequence: Synthetic polynucleotide
  source 1..1041: mol_type = other DNA
ggtagtggagcaggaggtgttggaggcggttacggatggggagatggaggttacggctccgattcagctgctgctgccgccgctgccgctgccgcagctgctgcttcaggtgccggaggtgctggaggatacggtggttatggatcggactcagctgccgcggctgctgctgcagcagccgccgcagctgcttcttcaggtgctggaggcgcgggtggaggttatggatggggagacggtggatacggttcagactctgccgctgcagcggccgccgcagcagctgcagctgcaggttctggtgctggtggaagaggtgatggaggatatggatctggtagtagtgccgcagccgctgctgcagcagcggctgcagctgccgcttctggtgcaggaggttcaggtggtggttacggctggggagatggaggatatggtagtggatctgctgctgcagctgctgcggcagccgcagccgccgcagctggatctggtgcgggcggagtcggtggaggctacggttggggagacggaggatatggtagtgactccgctgccgctgctgcggcagctgcagctgccgctgccgcatctggagcaggaggtgccggtggctacggcggatacggaagtgattccgctgcggctgcagctgcggccgctgctgccgctgctgctggttccggtgctggtggagcaggaggtggttacggatggggtgatggtggttacggttcagatagcgctgccgcagcggccgcagctgctgcggctgccgcagcttccggagctggaggacgaggtgacggaggatacggaagtggaagttctgccgctgctgctgccgcagctgccgcagcagccgctcgacgtgcaggctatgatagggccgcaggaagtgccgccgctgcagctgctgcagctgcagccgccgccgctagtggtgctggcggttcaggcggaggatatggctggggagatggtggctacggatctgattcagctgcagctgctgccgcagccgccgcagccgctgcggca

SEQ ID NO: 2226 - DNA, 753 bp, synthetic construct
  misc_feature 1..753: note = Description of Artificial Sequence: Synthetic polynucleotide
  source 1..753: mol_type = other DNA
ggttccggtgctggaggtgtgggaggaggttacggctggggagacggtggctacggatctgattcagcggccgctgctgcagccgccgcagcagccgctagtggtgctggaggtagcggcggttatggtggttatggttcagactcagccgctgccgcagcagccgccgctgctgctgctgccgctggtagtggagctggtggtgttggaggaggttatggttggggtgatggcggatatggatctgatagtgcagctgccgcagccgccgcggcagctgcagcttcaggagctggtggttctggaggatatggaggatatggtagtgactccgctgccgccgccgctgctgcagctgctgcagcagcggctggatcaggcgctggtggagttggtggaggttacggttggggtgatggtggttacggcggatacggatcagattctgctgctgcagccgcagcggctgccgctgctgctggttccggtgcgggaggtgttggtggaggctatggcagaggagactctggttacggctccggctcttccgcagcagctgctgccgctgctgccgctgcggccagaagagcaggacatggtagatcctcaggctcagctgccgccgcagccgcagctgctgcagctgcagcagcttcaggagcaggcggttcaggtggtggatatggctgggattatggatcttatggctcggactcggccgccgccgcagctgctgctgcggctgcagctgca

SEQ ID NO: 2227 - DNA, 501 bp, synthetic construct
  misc_feature 1..501: note = Description of Artificial Sequence: Synthetic polynucleotide
  source 1..501: mol_type = other DNA
ggtaaaaaccttagacatcatgatgagtacgtcgataaccacggtcaattggttgagagattcacgacaagaaaacatttcgaacgtaacgcagcaactagacctcacttgtccggtaatgagagactagttgaaaccattgttttggaagaagatccatatggacacgaagatatttatgaggaagatgtcgttatcaaaagagttccaggtgcctcaagttcagctgccgctgcttctagcgcttctgctggatcgggtcaaactattatcgtagaacgccaggcatctcatggagcgggtggtgctgctggagctgcagctggtgctgccgctggttcatccgcaaggaggggaggtggtttttacgagactcacaattcttactcctcttacggttctggttcatcatccgctgctgcaggatcaggagcgggaggtgtcggcggtggttatggtagtgacagtgctgccgccgccgctgctgctgcagctgctgca

SEQ ID NO: 2228 - DNA, 402 bp, synthetic construct
  misc_feature 1..402: note = Description of Artificial Sequence: Synthetic polynucleotide
  source 1..402: mol_type = other DNA
ggttctggcgctggaggatctggaggtggttatggttggggagacggaggttacggaagtggatcctcggctgccgctgccgccgctgcagctgcagccgcaggatctagaagatccggtcacgatagggcctacggagctggatccgccgcagccgcagcagcagccgctgctgccggtgcaggagcatcaagacaagtgggtatttacggaaccgacgacggtttcgtccttgatggaggatatgattctgagggatctgctgctgcggccgcagcagctgctgcagcagccgcttcgagttctggtcgttcaaccgagggacatccattgctgagtatctgttgccgaccatgttcccattcacactcatatgaagcatcaaggatctctgtgcatgga

SEQ ID NO: 2229 - DNA, 558 bp, synthetic construct
  misc_feature 1..558: note = Description of Artificial Sequence: Synthetic polynucleotide
  source 1..558: mol_type = other DNA
ggttcaggagctggaggcgcaggcggtggatacggatggggtgattcaggttatggatctgactcagcagccgcagctgcagcagcggccgcagccgctgccgcctcaggtgctggtggatccggaggctatggtggatatggttccgactcagctgccgccgctgcagcagcggcagcagccgcagccgcaggcgcgggagcgggcggagctggaggatcctacggctggggagatggcggatatggatcggattcggcagccgcagcagctgcagcagcagcagccgcagcaggttctggtgcaggaggaagaggtgatggtggttatggatcaggtagttcagctgctgcagcagctgccgctgccgccgcctctgccgccaggcgcgctggacacgatagcgcagccggctctgctgctgctgcggccgctgcagcagctgcagctgccgcttctggtgccggtggttctggtggtggatatggttggggagacggaggatacggttccgactcggcggcagcggcagctgcagcagctgctgctgccgctgca

SEQ ID NO: 2230 - DNA, 558 bp, synthetic construct
  misc_feature 1..558: note = Description of Artificial Sequence: Synthetic polynucleotide
  source 1..558: mol_type = other DNA
ggtagtggagccggaggtgccggaggaggttatggctggggtgatggtggatatggttcagacagtgcagctgccgcagccgcagccgctgccgctgctgctgcttccggagctagaggtagcggaggttacggtggttacggatcggatagcgctgctgctgctgcagctgcagcagcagcagcagccgctggaagtggtgctggtggtgttggaggtggttatggttggggagatggtggttacggatctgatagtgcagctgccgctgcagcagccgccgccgctgcggccggaagcggtgccggcggaaggggtgacggaggatacggttccggatctagtgctgcagcagccgctgcagctgctgctgctgccgcgagaagagctggtcatgaccgggccgcaggttcagcagctgctgccgcggctgcagcagctgccgccgcagcttctggcgctggtggatcaggtggtggatatggatggggagatggaggatacggtagcgattctgcagctgctgcggcggctgctgctgctgcggctgcagcagca

SEQ ID NO: 2231 - DNA, 747 bp, synthetic construct
  misc_feature 1..747: note = Description of Artificial Sequence: Synthetic polynucleotide
  source 1..747: mol_type = other DNA
ggtagcggtgctggtggacgcggcgacggaggttacggttggggagatggtggatatggttcagattctggtgcagctgctgccgctgcagctgccgctgcggcagctgcatctggtgcaggcggaagaggtgatggaggttatggtagaggtgacggaggatatggaagtgatagtgctgctgcagcagcagccgcagcagcagccgcggcaggatctggagcaggaggtcaggcaacggttgttatggacggtgctatggccgcaatggttttaactagagcccaacaacaattagcggctgcagccgcagctgcttcagccagtggagctggtggatctggcggaagttatgaatgggattacggaagttacggatcagattccgcagccgcagcagcggctgccgccgctgccgctgctgccggttctggtgctggcggtgtgggtggtggatatggtcgtggtgatggtggctatggctctgatagtgctgccgcagccgcagctgcagccgccgcggcagcaggatccggtgctggaggaagaggagatggtggttatggatggggagatggcggctacggctctgattctggtgctgcagcagctgcagcagcagctgctgctgctgcagccagcggtgcgggaggcagaggcgacggtggttacggatggggagacggaggatacggatccgaccctggagctgccgctgctgctgcagctgctgctgccgccgctgca

SEQ ID NO: 2232 - DNA, 378 bp, synthetic construct
  misc_feature 1..378: note = Description of Artificial Sequence: Synthetic polynucleotide
  source 1..378: mol_type = other DNA
ggtaagacacttaaccatattggactacatcctaaaggcaacacgcgtattgatgagtatgtggataaaacaggtcagctgtatgaaagatacacgaccagagaagagttcgaaaggaacgccgctactttaccacacttgtcccgcaacgaaagattgttggaaacgatcatcatcgaggaagatccatcaggtcatgagaaaatatataaagaggatgtcgttcttaaacgtgttcctggagcttcttctgccgcttctgctagtagcgctgccgccgctggttctggttccagaagattaggcaggttgcatggatgggatggcggtgcttacggctccgattcagctgctgcggctgccgctgcagctgccgca

SEQ ID NO: 2233 - DNA, 612 bp, synthetic construct
  misc_feature 1..612: note = Description of Artificial Sequence: Synthetic polynucleotide
  source 1..612: mol_type = other DNA
ggttccggagctggtggcttaggcggtctgtacggattacacggaggatattacggatcagactctgcagcagctgccgcagccgctgccgctgcagcagccggatccggagctggtggtcttggaggactctacggtttgcatggaggagtttatggttccgacagcgctgctgctgctgctgcagccgccgccgcaacagctggttctggtgcggaaggattaggaggtctgtacggactccacggaggatattatggtagtgactctggagctgcagcggccgctgcagctgcagcagctgctggtagtggtgctggtggtttgggaggacattatggactgcacggaggcgtgtatggttctgacagtgcagctgctgcggccgcagccgcggccgcagctgcaggttccggtgctggtggtttaggaggattgtatggtctacacggaggagtttatggatcctccagttcgcgtagagactcttcttccgctagctctgctgccgccgccgctgcggctgccgcaggaagctccgccgcatctagcgaaagagtctacgaatccgagtcagcagcagcagcagctgccgcggcagcggcagctgca

SEQ ID NO: 2234 - DNA, 714 bp, synthetic construct
  misc_feature 1..714: note = Description of Artificial Sequence: Synthetic polynucleotide
  source 1..714: mol_type = other DNA
ggtagcggctcaagaggtctgggtggactctacggttgggatggtggagtctacggttccgacagcgccgccgcggcggccgctgccgccgctgctgccgctggatctggtgtttctggtttaggtggtttgtacggatgggatggtggagtgtacggtagtgattccgcagctgcagccgctgcagcagccgccgcagctgccggttccggatctcgtggcttgggaggattatacggatggaatggtggtgtctatggatcagattctgccgcagccgcggctgcagctgccgctgcagcggcaggttctggcgtctctggacttggtggactttatggatgggataggggagtgtacggttctgacagcgctgctgcggctgctgccgcagctgccgccgctgccggctcaggttcaagaggattaggtggattatacggttggaacggtggcgtctatggatccgattctgctgctgccgctgccgccgccgcagcggctgctgcaggctctggtgttagcggattgggaggtctgtatggatgggacggtggtttatacggtagcgattcggctgccgcagccgctgcagccgctgctgcagctgcaggtagtggagtatcaggactaggaggcttgtacggatgggacggcggtttatacggaagtgatagtgcagccgcagcagctgctgctgcagcagcagcagca

SEQ ID NO: 2235 - DNA, 714 bp, synthetic construct
  misc_feature 1..714: note = Description of Artificial Sequence: Synthetic polynucleotide
  source 1..714: mol_type = other DNA
ggttctggagctggaggtctaggaggtctatacggttatcatggtggtgtctatggatcagatagtgctgccgctgccgcggccgccgcagcagctgccgctggttcaggtatttcaggattgggtggtctttacggatgggatggaggcctctatggttcggatagcgctgccgccgctgctgctgccgcggcagccgcagcaggttctggctctagaggattaggtggcctatacggatgggatggtggcgtgtacggatctgatagtgccgctgcagcggccgctgctgcggcagctgccgctggatccggatctcgtggactgggtggcctctatggttgggacggaggagtttatggatccgattctgcggcggcagccgctgcagcggctgctgctgcagcaggatcgggagtctctggactcggtggcctttatggatgggatggaggactgtatggatccgattcctcggccgcagctgcagcggcagctgccgccgctgccggttcaggctctaggagattgggcggattgtatggatgggatggtggagtttacggctctgattctgcagctgcagctgctgctgctgccgcagcagctgcaggttccggtgtaggtggactgggaggattatacggttgggatggaggagtttatggtagcgattctgctgcagctgccgcggcagcagccgccgctgccgca

SEQ ID NO: 2236 - DNA, 408 bp, synthetic construct
  misc_feature 1..408: note = Description of Artificial Sequence: Synthetic polynucleotide
  source 1..408: mol_type = other DNA
ggtcaatacattgacgatgacatttaccgtctgaagcgtacttacggcgaaacttctaatactcgttccgatgaatacgacgttgacaagttcggaagattatatgagcgaacaaccactcgtaagaagttcgaaggtaactcaaaagtatctccttacattagtggagatgagaaggttgtggaaactattgtttatgaaaacaacccagtcggtcgaggaactatctatgaagaggacgtcgttatcaaaaaggtacctgacgaaacgtctattggaacagctgcttcttcagcatctgctggtgctggactcggcatagctccaacaatcatcgttgaacgtcctttcgaaaattacggtggcggtgctgctgccggtgcagccgctgcagctgccgcagcagca

SEQ ID NO: 2237 - DNA, 552 bp, synthetic construct
  misc_feature 1..552: note = Description of Artificial Sequence: Synthetic polynucleotide
  source 1..552: mol_type = other DNA
ggttcgtctggtgttggttacgaaaggggatacggttctgactctgctgctgcggcagccgctgctgcagcggccgccgcggctggatctggatctagaggtcttggaggttactacggagatggattgttggatggaggctacggtagtggatccgccgctgccgcggccgccgcagctgctgcagctgctgattccggtagtagaggtttaggcggatattatggagacggcctgctagacggagaatatggatcaggctcagctgcagccgctgccgctgccgctgctgccgctgcaggatcgtcaggagtaggttatggtcgtcgttatggaagcgattctgctgccgctgctgcagcagctgctgctgcagcagcaggttcatcaagcgactacacagtgtatgaaagctctagacggggatccagctcttcagccgcagccgcagccgccgccgccgcagccgcaggttcaagcgaagctggttacgaaagaggttacgaatcggattcagctgctgcggcggctgccgccgcagcagctgccgca

SEQ ID NO: 2238 - DNA, 786 bp, synthetic construct
  misc_feature 1..786: note = Description of Artificial Sequence: Synthetic polynucleotide
  source 1..786: mol_type = other DNA
ggttccggaactaggggattgggtggatactacggtaaagatggtggtttattgttagatggagagtatggttccggatcagccgctgctgctgccgctgctgccgccgccgcttctggaagccgtggcttgggtggtttttatggcgacggacttctggatggaggctatggttctggctctgccgccgctgccgccgcagcagccgctgctgcaggatcaggaagtagaggattaggaggtttttatggtgacggactcttggacggaggatatggttctggttctgcggcggcggcagctgcggctgctgcagccgcaggcagtggatctcggggattgggtggctactatggcgacggaatattggatgacggttacggttctggttcggctgccgctgccgctgcagctgcagcagccgctgccggatctggctcaagaggacttggtggctattacggagacggacttttggacggtgagtatggttctggtagcgccgcagccgctgccgcagctgcagctgcagccgcaggatcgtccggagttggatatggacgtagatatggttctgattccgcagcggctgcagcagcagccgcagcagctgccgccggttcttcgtctgactacactgtttacgaatcttcacgaagaggatcatcatcttccgcagcagctgctgcagcagcagctgctgctgctggtagttccgaagctggttatgaacgtggatatgaatctgatagtgctgcggctgcggcagctgcagcagctgccgca

SEQ ID NO: 2239 - DNA, 567 bp, synthetic construct
  misc_feature 1..567: note = Description of Artificial Sequence: Synthetic polynucleotide
  source 1..567: mol_type = other DNA
ggttccggaagtagaggcctgggcggtttctatggcgacggattactggatggaggatatggcagtggttctgctgcagcagctgctgcagctgccgctgcagctggtagcggctccagaggtctgggaggttattatggagacggtttacttgatggcggctacggatcaggatcggctgccgccgctgctgcggctgctgctgctgcaggatcaggttctagaggattgggtggctattacggagacggattgttggatggtgagtacggatccggttcagctgccgcagctgcggccgctgcagctgctgctgagggatcatcaggcgttggatatggtagacgttacggtagcgattctgctgctgccgctgcagcagccgctgccgctgccgcaggatcctcctccgattatactgtgtacgaatctagtagacgtagaagttcaagtagtgcagcagcagccgcagcagctgcggctgcagcaggatcttccgaggcaggttacgagagaggctatgagtctgattctgctgccgcagccgccgctgctgccgcagctgca

SEQ ID NO: 2240 - DNA, 663 bp, synthetic construct
  misc_feature 1..663: note = Description of Artificial Sequence: Synthetic polynucleotide
  source 1..663: mol_type = other DNA
ggttctggttcaagaggacttggcggattctatggtgacggtttgcttgatggaggttatggttctggttccgctgctgcggctgccgctgctgcagcggctgctggctccggatccagaggattaggaggttattacggtgacggtttattagacggtggatatggatctggttcagcagcagcggcggctgccgccgcagccgcagccggttctggcagtcgtggccttggaggatactatggagatggtctattggatggtggatacggctctggaagtgctgcagctgcagccgctgcagctgcagctgccggttctggaagtggtggcttaggtggctactacggtgatggtctgttggacggagaatacggatcgggttcggctgcagctgcagcagcagcggctgctgctgccgagggctcatcgggtgtaggatatggcagaaggtatggttctgactcagcagctgctgctgctgcggccgcagctgctgcaggatcctccagtgactattctgtctataaatcatccagaagagaaagttcctccagtgcagccgccgcggctgctgcggctgcagccgccggctcatccgaagcaggctacgaaagaggatacgagtccgactctgccgcagcagctgcagctgctgcagca

SEQ ID NO: 2241 - DNA, 618 bp, synthetic construct
  misc_feature 1..618: note = Description of Artificial Sequence: Synthetic polynucleotide
  source 1..618: mol_type = other DNA
ggtgatgctattgatgacagtctattaaatttcaataatgaaaacttcattgaaatcggtgagtcgactaccgctgaagttgatgtagaaaacggcactctagtagaaagggaaaccacccgtaaaaaatacgaacgtgacggtgatataacccctaatatctcaggtgaagataaaatcgtgagaacttttgtcatagaaacagatgcttctggtcatgaaactgtctacgaggaggacgtcgtcattaaacgtaagccaggccagcaaggtgtgactgagcgtacaactataggccgtagacaaactggtataagtgccgcaccagtgcctgcccctagttcccaggctccaaccgtcgttgttgaatccaattcacctatcgcgccagcgccagttagtggacctgtttccatcggtcctcaattgggcgccgttggcccttacggtccatcaagaagctcaaccgcaacaaccacctctggtaccggtgttgttcagcaaatccgtactgacagcactggttcatcagcggcttcagctgctaccggcgcttcttccgtagctccagttattgttatcgaggacggtagcagcgccgcgtctgctgcagctgca

SEQ ID NO: 2242 - DNA, 306 bp, synthetic construct
  misc_feature 1..306: note = Description of Artificial Sequence: Synthetic polynucleotide
  source 1..306: mol_type = other DNA
ggttctggagcatccggtccaggaggactgggtctgggcggcttaggcccgtatggcggaattggccctaacgtggtgtccgcagcaagcgcccctgtcgttggaccttctgtgagctcagtcggacctgttggagcccaggtgatcgagatcggttctccagttgtgccatccgtgagcagaactggcagtgtttctagagtttcagtctctggtagacctggagtcagagtcccgtgtagtcttacaagaaggcaatttgtcgtcaaaattggtactaggagacaaccatgtggttattgctca

SEQ ID NO: 2243 - DNA, 1440 bp, synthetic construct
  misc_feature 1..1440: note = Description of Artificial Sequence: Synthetic polynucleotide
  source 1..1440: mol_type = other DNA
ggttcaggtgcaagtggtgtgggcggattgggactgggtgcattgggtcctttaggtggtattggtcaatcaggagtctcttcagctaccacgtcgggagcaggcctaggtggtgtgggagccgtgggagcctcgggtttaggtggtcttggtggagctggagcttctgctgctggatccgctggagctggactcggtggagtaggagtgggtggatcctcaggatcatctgctgcatctgccgcatctggcgctagcggtgcaggcgaggttatattaattgatgatcgttcttctgctgcttccagggcagctgctggttccggagcttccggtgtgggaggtttgggtttgtcaggattgggtccaatcggaggtattggaccaattggtgccacaagtgcctctacttctggtgccggtcttggtggtgtcggagctgctggcgcctctggcttgggaggtctaggaggcgctggtgcaagtgccgctggttctgcgggtgctggattaggaggtattggagcaggaggatcatcaggctcgtcagctgcatccgcagcatccggtgcctctggtgctggtgaagtaattgtgatcgacgatagatcatcggccgcatccgctgccgcagcatcttctggagcatcaggtctgggtggtctaggacttggaggactcggaccttatggtggtataggtttaaatggtgtttctagcgcatccgctctaggcgctggacttggcggagttggaactgcaggagcttctggcctgggtggtttaggaggagcaggagttagtgcagttggacctgccggtgcaggcctgggaggcgttggtgccggaggatcgtcaggatcttcagcagcctctgcagcctccgccagaagtggtccagcgccagttatcgttattgaggacggtagttctgccgcatctgctgcagctgctggtagtggagcatcgggcttaggtggtctaggcctcggagcgtggggacctttgggtggtataggacctaacgaggtttcttccgcttccgctactggaagtgcagctggatccactggtgcaggtttgggaggttccggtgcagctggtagtagtgctgccagtgctgctagtggcgctgctggtccagctccagtaatagtgatcgaagatggatcctctgcagcttccgcagctgccgctggaagtggtgcatcaggcctgggcggtcttggtttaggcgctatgggaactcttggtggtattggaccgaatggtgtgtctagcgcttccgccacgggttcagccgcaggatctatcggcagcggactttgcggcagtggtgcggcaggttccagcctggcttcagcggcttccggtgctgctggagcagcaccagtcattgtcatagaggatggatcatcagctgcctctgccgcagctgca

SEQ ID NO: 2244 - DNA, 1683 bp, synthetic construct
  misc_feature 1..1683: note = Description of Artificial Sequence: Synthetic polynucleotide
  source 1..1683: mol_type = other DNA
ggttctggagcatccggtgtcggtggattgggtttgggagctttaggtccactgggtggaataggtcctatcggtgcctcttccgctggtgcttccggagctggattgggtggtgttggagcagctggaacatctggccttggtggtatcggtggagtcggagcttcaaccgctggatccgctggcgctggtttgggaggtataggagccggtggttcgtcgggatccagcgctgcgtccgccgcatccggagctagtggtgccggtgaagttatagttattgatgacagatccagtgccgcatcggcagctgcagctggctctggtgctagtggccccggaggcctcggattgggagtctggggtcctttaggtggtataggaccaattggagcttcatccgcatctgcaagcggagctggtttaggtggagtgggagccgccggcacttccggtttaggcggattgggcggtgctggtgcatctgcggctggatctgctggtgctggtttgggtggtattggagcaagtggttcctcaggatcaagtgtcgcttcagctgccagtggtacttcaggagccggagaggtgatcgtaattgacgatagaagctcggctgcttcagccgctgcagctggctcaggagcgtctggacttggcggtctaggtctgggtggactcggtccatatggtggaattggtctaaacggagtgtcgtctgcttccgctctaggcgctggattgggtggagtcggtacggcgggagcttctggcttaggtggacttggaggaaccggcgcctcggcagctggtagtgccggtgctggcttaggaggcgttggtgctggaggttcttttggttctagtgcagcctccgctgctagtggagcatcgggtgctggtgaagtgattgtaatagacgatagatcttcagccgcaagtgctgctgcagctggttccggcgccagcggtccaggcggcttgggtttgggtgtctggggacctctaggcggtatcggtccaaacggtgttagttccgccagtgccactggttcggccgccggatccaccggagctggtctaggaggatctggtgcagcaggttcaagcgctgccagtgctgcctcaggagctgccggaccagctcctgtcattgttatagaggatggttcaagtgccgcctcggcagctgctgctggttccggtgcaagtggtctaggtggattgggtctgggagcctggggtcctcttggtggaattggacctaatggagtctcctctgcttcagcaacgggatctgccgccggatcaactggtgccggtttgggtggctcaggagcggctggttccagcgccgcttcggcagcatctggagccgcaggacctgctcctgtgatagtcatcgaagatggttcctcagcagctagtgctgcggccgccggttcaggtgccagcggtctaggaggcttgggactaggtgcatggggacctttaggaggaatcggacctaatggtgtttcatcagcttcagctacaggatctgccgccggcagtactggagctggtctgggtggttcaggagctgcaggctcctcggcggcatcagccgcttctggagccgcaggtcctgctccggtgattgttatagaagatggttcatctgcagcctccgcagccgcagca

SEQ ID NO: 2245 - DNA, 393 bp, synthetic construct
  misc_feature 1..393: note = Description of Artificial Sequence: Synthetic polynucleotide
  source 1..393: mol_type = other DNA
ggtaatattaatgatttcgatgaggattacttcggttccgacgttaccgtccaaagttcaaatactacggatgaaatcatcagagacgcatctggagccgtaatcgaggaacagataaccacaaaaaaaatgcaacgtaagaacaaaaatcacggtatccttggcaaaaatgagaagatgataaaaacttttgttattaccaccgactcggacggtaacgaaagtattgttgaagaggacgtgcttatgaaaacattgtccgatggtactgtggcccagtcatacgttgccgctgacgcaggagcctattcgcagtccggaccttatgtcagcaactccggttactcaacacatcaaggttacacttctgatttcagtacctccgctgctgta

SEQ ID NO: 2246 - DNA, 450 bp, synthetic construct
  misc_feature 1..450: note = Description of Artificial Sequence: Synthetic polynucleotide
  source 1..450: mol_type = other DNA
ggtgctggtgctggctccggtgctgcttccggagctggtgccggtgctggtgctggtacaggctcatcaggatttggaccatatgttgctaacggaggatactcccgaagagaaggttacgaatatgcatggtcctctaaatctgacttcgagactggttccggtgccgccagtggagcaggagcgggcgccggtagcggtgcaggagctggatctggcgctggtgcaggctctggagccggcgcaggttccggcgcaggcgccggtggtagcgtgagctacggtgctggtagaggttacggtcagggcgcaggctctgcagcctcttctgtgtcatctgcatcgtctagatcatatgattattcccgcagaaacgtcagaaaaaattgcggaatccctagacgccaattagtggttaagtttcgagccttgccatgtgttaattgcgga

SEQ ID NO: 2247 - DNA, 1209 bp, synthetic construct
  misc_feature 1..1209: note = Description of Artificial Sequence: Synthetic polynucleotide
  source 1..1209: mol_type = other DNA
ggtgcaggagccggttcgggtgcaggagcaggttccggagccggcgcaggttctggagcaggagcaggttcgggtgctggctacggtgcgggagtgggagcaggctacggtgctggttacggtgctggtgctggagctggttatggtgctggtgctggctctggcgctggtagtggcgcaggcgccggatctggtgcgggcgcaggttcaggtgccggtgctggatccggtgcaggagcaggatccggtgctggtgccggctctggtgctggtgctggtagcggtgccggagcaggatcaggagccggtgcaggatcgggagcaggagctggatacggagcaggctacggcgcaggagctggagctggatatggagccggagctggcagtggtgcaggttcgggagctggcgcaggttctggtgccggtgccggttctggtgctggagccggttctggagctggagcaggttcaggagctggagctggttctggtgcaggcgcaggctccggtgcgggtgccggctctggagccggagccggatacggtgctggagttggagcaggttacggtgccggttatggagcaggagccggagccggttacggagctggtgctggttcaggtgctggatccggtgccggtgctggttctggagctggtgccggttccggagctggagccggctcaggtgctggtgttggatcgggagccggtgctggctccggagcaggagctggttccggtgccggagcaggtagcggcgccggagcaggatacggtgcaggatatggtgccggcgctggtgccggatatggcgctggtgcaggatccggagcaggctcgggtgctggagctggatccggagccggtgccggaagcggcgctggcgccggttctggagccggcgctggaagcggagctggtgccggatctggagctggtgctggaagtggtgctggtgcaggttctggtgccggagttggttacggagcaggagttggcgccggatacggtgctggctacggcgctggcgccggagctggttacggagctggcgcaggatcaggagcagcatcaggtgctggtgccggtgctggagctggtgcaggtacaggttcctctggttttggtccttacgtcgctaacggaggatactccggatatgaatacgcttggagttctgaatcggattttggcacgggctca

SEQ ID NO: 2248 - DNA, 957 bp, synthetic construct
  misc_feature 1..957: note = Description of Artificial Sequence: Synthetic polynucleotide
  source 1..957: mol_type = other DNA
ggtgctggagctggttctggagctggagctggtgcaggagctggcgctggaagcggagctggagctggttatggagctggtgtcggagcaggttacggagctggatacggagctggtgccggcgccggttacggtgctggagccggatctggcacgggttccggtgctggagcaggatctggtgctggtgccggatacggcgctggcgttggagctggatacggcgcaggcgcaggaagtggtgctgcttttggtgctggtgcgggcgcaggcgcaggttccggagccggtgccggctcaggtgctggtgctggttccggagccggagcaggcagtggtgccggcgcaggatctggtgcaggagctggatatggtgccggttatggtgccggagttggtgcaggatacggagccggtgccggtagtggtgcagcttctggcgctggcgcgggatctggtgctggagctggaagcggcgcaggagctggttctggtgctggtgcaggatcaggagcaggagctggatctggagctggtgcgggctacggagccggagttggtgctggttatggtgctggttacggagctggcgctggagcaggatacggtgccggtgccggctccggagcagcttcaggtgcaggcgctggttcaggagccggcgcaggagcaggatcaggagcgggcgctggatccggcgctggcgccggttccggtgcaggcgccggaagcggagcaggttccggtgccggcgctggttcgggagctggtgccggatctggagccggtgctggatatggtgctggtgccggttcgggtgcagcttctggtgccggagccggagccggtgctggagccggtacaggttcttccggtttcggaccttacgttgcaaatggaggatactccggatacgagtacgcgtggtcctcagaatccgattttggaactggttca

SEQ ID NO: 2249 - DNA, 1173 bp, synthetic construct
  misc_feature 1..1173: note = Description of Artificial Sequence: Synthetic polynucleotide
  source 1..1173: mol_type = other DNA
ggtgccggtgcaggatcgggagctggcgctggatctggtgcaggagccggatatggagccggttatggtgccggagttggagcaggttacggtgccggtgcgggcgtaggatatggtgccggagctggtgcaggatacggagctggagctggctcgggtgctgcaagcggagctggagccggtgccggtgctggtgcaggatccggagctggagcgggttctggtgctggtgctggcgcaggctcaggtgctggtgccggatatggagcgggatacggaattggtgtgggagctggctacggtgccggtgctggagtcggttatggtgctggcgcgggagctggatatggcgcaggagccggttccggagccgcttcaggtgccggtgccggtagcggtgcaggcgctggatcaggagccggtgctggctctggagccggtgcaggttctggagccggtgccggaagtggagccggtgccggatcaggcgccggtgctggatacggagctggatatggagctggtgtgggcgcaggttacggagctggtgctggtgttggttacggtgctggtgccggtgcaggatatggtgctggagcaggttccggcgctgcttcaggtgctggagctggtgctggagccggtgctggagctggttcaggcgcaggagctggatcaggagccggcgccggatcaggagctggtgctggttctggtgctggagctggaagcggagccggcgctggttctggagctggagctggatctggtgcgggcgcaggatcgggtgccggagcaggctcaggagctggcgccggatacggagctggtgtcggtgctggttacggagctggttatggcggtgcgggtgcaggttatggagctggagcaggttctggagctgcttctggtgctggtgcgggctcaggagctggagctggatccggagccggtgctggatctggcgccggtgcgggatcaggtgcgggtgctggaagtggcgcaggcgctggctatggagctggcgccggcagtggtgccgcttctggtgcaggcgctggagccggagcaggcgcaggtacaggttcttctggtttcggtccatacgttaacggtggatattccggatatgaatacgcgtggtcatcggaatctgactttggaactggatca

SEQ ID NO: 2250 - DNA, 507 bp, synthetic construct
  misc_feature 1..507: note = Description of Artificial Sequence: Synthetic polynucleotide
  source 1..507: mol_type = other DNA
ggtgcagatattttggaaactggtattcttggaggcaatgtccgcgaggtttctgaatcgactactgataattttaccactgatggtaatggtaacgtgaccgaagtaaaaacaacacataaagaattccgcagacaaggtgaggttcctaacaatatttcaggagaggacaaactcgtcagaacttttgtaatcgaaaccgacgcatcgggaaacgaggtcatatacgaggaggatgtagttatccataaggttcctggtactagtgcaactacaaagactactaccgctagaaggcaacttggtggtatcggtggtacaggagcagcctcctcttctgccgcaactagtcctcctcggcctactagtccatatggtccaaatggttcctctagtgcagctacttcttctgcttccggttccgccccagttattgtcattgaagagaatcagagctcggctgccgccgctgcttcttcttccagctccggaccaaatggactccta

SEQ ID NO: 2251 - DNA, 570 bp, synthetic construct
  misc_feature 1..570: note = Description of Artificial Sequence: Synthetic polynucleotide
  source 1..570: mol_type = other DNA
ggtccatacggaccaaatggttcgagtgcttcaagcgcagcttcttccggagctgcaggagctggtggccttaacggaatatacggtagtaacggtgctttgttgagcggcgctgcaggcgtcaacggtttaaacggtctttacggcccaaacggcagttctgcttcttctgcaggagccgcaggaattggtggtctaaatggattaaacggttcaaacggatcttcctcggccgctagttcttcagcttctggctctggaccagtaatcgtgatcgaggaaaaccaatcttctgctgccgctgccgcctcctcttctagttcgggaccaaacggtttgttgggtccttacggtcctaatggatctgcggcttcaagtgccgcagcaagtaatgcaggaaataacggtcctgtagttattatagagaggggatcctcttcatccgcagctgcgggttcatcatcatctgccccttacgtccttccaggtgtccgtggaccttgtcgactaaccaggagacagttcgtagtgaagataggatctagacgacaaccttgtcttacttgttca

SEQ ID NO: 2252 - DNA, 684 bp, synthetic construct
  misc_feature 1..684: note = Description of Artificial Sequence: Synthetic polynucleotide
  source 1..684: mol_type = other DNA
ggtccatacggtccaaatggttctgctgcatcgtcagcagctgcaagtggagccgctggagccggtggcctaaatggattatatggatccaatggcgccttattgtccggagctgcaggagtcaatggtttgaatggtttgtatggacctaatggttcatcggcttcatccgctggtgccgccggcattggcggtttaaacggtttgaacggcagtaatggatcagcatctgccgcatcatcctcagctagcggtagtggacctgtcattgtaattgaggagaaccagtcgtccgccgcagcagccgcctcttcatcaagttcaggacaaaatggcttgcttggaccgtacggtcctaacggaagttctgcttcctctgcagcctcctctggtgctgccggcgccggtggtcttaatggtatttatggatctaacggtgctttgctctcaggtgctgcaggagcaaacggcgttaacggtctgtatggtccaaacggatccagcgcatcttccgccggtgctgcaggaatcggcggactcaatggcctaaatggttcaaacggttccgcttctgcagcttcatctagcgcttctggaagcggacctgtaattgttattgaagagaatcaatccagcgccgctgctgcagctagttcctcctcttctggccctaacggattgcta

SEQ ID NO: 2253 - DNA, 684 bp, synthetic construct
  misc_feature 1..684: note = Description of Artificial Sequence: Synthetic polynucleotide
  source 1..684: mol_type = other DNA
ggtccttatggacctaacggtagtgcagcttctagtgccgccgcctcaggcgctgccggtgctggaggtctgaatggtctttatggttccaacggtgcattgctgtccggtgctgccggagttaatggcttgaacggcctatatggacctaatggttcgtctgcgtcctcagcaggcgctgcaggaatcggaggattaaatggtctgaacggttcgaacggatcagcttctgctgcctccagttccgcatctggaagtggaccggtaattgtaatagaagaaaatcaatcttcagctgctgctgccgcgtcatcatcttccagtggccagaatggcttgttaggcccatatggcccaaacggaagcagtgcatcctctgcagcaagttctggagctgctggagctggtggtttaaacggaatttacggctctaatggtgctttgctttctggtgctgccggtgcaaacggtgtaaatggcttgtacggaccaaacggatcaagtgccagctcagctggcgctgccggtatcggtggtttgaacggacttaatggatcaaatggatcagcatcagccgcctcctcgtccgcgtctggatcaggtccagtcatagtaattgaagaaaaccaatcttccgctgccgctgcagcttcttcaagtagttccggtccgaatggcttacta

SEQ ID NO: 2254 - DNA, 924 bp, synthetic construct
  misc_feature 1..924: note = Description of Artificial Sequence: Synthetic polynucleotide
  source 1..924: mol_type = other DNA
ggttacggttcgggttcttccgccgcagcagccgctgctgcagcagccgccgcttccagaagagcaggccacgaaagagctgccggttccgctgctgctgctgcagccgcggctgccgctgctgcctccggtgtgggtagaagtggtggctcatatggttggggtgatggaggctacggatcagactctgccgctgctgctgctgccgcagctgctgcagctgctgctgcttctggagcaggaggagcaggagtatgtagaggttatggtggttacggatctgacggaagtggaagtgcagccgctgcagctgcagctgcggctgctgctggtagtggcgcaggaggcgttggaggaggttatggttggggagacggagcttatggttctgattcagccgccgccgcagcagctgcagccgcagccgccgctggttcaggtgccggtggtagacgcggatacggagcctacggatccgacagcagcgccgcagccgcggcagctgcagctgccgcatccggtgctggtggttctggtggtggttatggatggggagatggtggatacggatccgactcggctgcagcagcagctgctgcagccgctgctgccgctgctgctggttcaggagccggaggtataggtggaggattcggaagaggtgatggaggatacggttctggaagttcagcagcagcagcggctgctgctgcggctgccgctgcgagacgtgctggtcatggaaggtctgctggtagcgcggcagcagctgctgccgcggcagcggccgctgctgctagcggagctggaggatccggaggttcttacggttgggattatgagtcatatggtagcggttctgctgctgcggccgccggttcaggcgcgggaggatctggaggtggttatggttggggtgacgga

SEQ ID NO: 2255 - DNA, 276 bp, synthetic construct
  misc_feature 1..276: note = Description of Artificial Sequence: Synthetic polynucleotide
  source 1..276: mol_type = other DNA
ggtggatatggagcaggaagcgcagctgcagcagcagctgctgcggccgctggtgctggagctagcagacaagtgggcatctacggaactgatgatggctttatcctagacggaggttacgactctgaaggttccgctgccgcagctgccgccgcggccgctgctgccgcctcctcttcaggaaggtctacagagggtcaccctttattgagcatttgttgtagaccatgttcacattcccacagttacgaagccagcagaatgccagtccattca

SEQ ID NO: 2256 - DNA, 468 bp, synthetic construct
  misc_feature 1..468: note = Description of Artificial Sequence: Synthetic polynucleotide
  source 1..468: mol_type = other DNA
ggtgctacgggtgctactggacctcaaggtatacaaggacctgctggagctacaggagctactggtgccacgggtccacaaggccctcagggcattcaaggtccagctggtgccacaggagccacaggtgcccagggtgcacaaggcccagctggtgcaactggtcctcaaggccctcaaggtattcaaggacctgccggtgccactggtgcgacgggagcccagggagctcagggaccagctggagcaacaggtgcaacaggagcaactggtgctcaaggcccacagggtgttcaaggtccagcaggcgccaccggagccacaggagcccaaggtccagctggcgctactggagctaccggcgccactggagctcaaggcccacaaggtgtccaaggaccagctggtgctacaggagcaactggagctcaaggtccacagggagttcagggtccggctggtgctaca

SEQ ID NO: 2257 - DNA, 513 bp, synthetic construct
  misc_feature 1..513: note = Description of Artificial Sequence: Synthetic polynucleotide
  source 1..513: mol_type = other DNA
ggtgctacaggagcacaaggtcctcaaggcattcaaggtccagctggagccacaggtgctactggccctcagggtccacagggaattcagggtccagctggtgctacgggcgcgaccggtgcacaaggtgcgcaaggtcctgctggtgctacaggagctactggtgctcaaggtgcccagggaccagccggcgccacaggtgcaaccggcgccactggagcacagggaccccagggtgttcaaggaccagccggtgcaactggtgctcagggtgctcaaggagttcaaggaccagcaggagctaccggagctaccggcgctcaaggacctcaaggtgtacaaggtcccgctggtgcaaccggagcaaccggtgcccaaggtccccaaggcgttcaaggacctgccggagctaccggagccaccggtgctcagggtcctcaaggtgttcaaggcccagctggcgccactggagctactggagcgcaaggaccacaaggagttcaaggtcctgca

SEQ ID NO: 2258 - DNA, 1020 bp, synthetic construct
  misc_feature 1..1020: note = Description of Artificial Sequence: Synthetic polynucleotide
  source 1..1020: mol_type = other DNA
ggtctgcaaggtccacaaggaattcaaggtgttcctggtccagtgggtgccaccggtcctgaaggtcctcagggtattcaaggtattcaaggagtacagggtgctactggtccacaaggtccacaaggtattcaaggcatacaaggcgttcaaggaattacaggagcaacaggtgttcaaggtgctaccggtattcaaggcatccaaggagagatcggagctacgggtccagagggtccacagggtgttcaaggtgcacaaggtgccataggtcctacaggtcctatgggtcctcagggtgtacagggagtgcagggaatccaaggagccactggagctcagggtgtgcagggtccacagggtattcagggaattcaaggaccaactggagctacaggcgatatgggtgctaccggagctactggagagggagcaactggcccaactggtgtcaccggaccaactggagtgaccggaccttcaggtggccccgctggacccaccggccctactggtccttcgggaccagcaggagttacaggaccttcaggaggaccacctggtcctactggtgcaactggtgcaacaggaataacgggcgatactggagctactggctctactggagttacgggcgccactggcgaaactggtgccacgggtgttactggcctgcaaggtcctcagggaatccagggcgttcaaggagagatcggtcctactggacctcaaggtgtgcaaggtcctcaaggtattcagggagttaccggcgccacgggtgaccaaggacctcagggtatccaaggtccccaaggagatattggacctactggacctcagggtatacaaggaccccagggatcgcaaggaatccagggtgcaactggaggtaccggtgcacagggtccccaaggaatccaaggtccacagggtgatattggtccaaccggtccacagggtccgaccggtatacaaggaattcagggtgaaataggccctactggaccggaaggccctgaa

SEQ ID NO: 2259 - DNA, 846 bp, synthetic construct
  misc_feature 1..846: note = Description of Artificial Sequence: Synthetic polynucleotide
  source 1..846: mol_type = other DNA
ggtgccacaggcgctacaggacctcaaggtgcgcaaggcccagccggagctacgggtgcaacaggcccacagggtgtgcaaggtaacacaggagcaaccggcgctacaggtccccaaggcgctcaaggaccagctggtgcaacgggtgcaactggtccccaaggtgttcaaggaaacacaggtgctacaggagccacgggtccgcaaggtgcccagggtcctgccggtgcaactggagctactggtcctcaaggtgtccaaggaaacaccggagcaacaggtgccacaggaccacagggtgtccaaggaaataccggtgctaccggagccaccggaccacaaggtgtacagggcaacacaggtgctactggagccacaggaccacaaggtgtccagggaaatactggtgctactggagctactggcccacaaggtgtgcagggacctgccggagcgactggcgcaacaggtcctcaaggagtgcagggaccagctggtgctacaggcgctacgggtccacaaggtaataccggtgctacgggagcaacaggccctcagggtgcacaaggtccagcaggagcaactggtgccacgggtccacagggtgtacaaggtaacactggtgctacaggtgctacaggtccacaaggtgctcagggtccagctggcgccactggtgcaaccggtccacagggtgttcagggtaatactggcgccacaggtgcaactggacctcaaggtgttcaaggtaacacaggcgctactggagccactggacctcagggcgttcaaggtcctgctggtgccactggagctacaggcccacaaggtgttcagggtaataca

SEQ ID NO: 2260 - DNA, 1152 bp, synthetic construct
  misc_feature 1..1152: note = Description of Artificial Sequence: Synthetic polynucleotide
  source 1..1152: mol_type = other DNA
ggtgctacaggtccaactggtgcaactggtcctactggagctaccggaccaacgggcgtaaccggcccaaccggagttactggcgcaacaggaccaactggtgttacaggaccgactggagccatgggtccaaccggtgctactggtgccaccggtccaacaggagttactggatccaccggtgttacaggtgctactggagctacgggtccaactggagtcactggtcctaccggcgctatgggtcctactggtgctacgggtgcaacaggcgctaccggtgcaacaggtgctaccggagctacaggtcctacaggtgttactggtgctactggtgctacaggtcctacgggtgtaactggagcaacgggcgctaccggccccacaggtgccactggagccactggcccgactggagctactggtcctacaggagctacaggtgctaccggtccgacaggtgccactggtgccatgggtcctaccggtgccactggacctaccggagccacaggacctactggagttaccggttctactggtgcgacgggagctaccggaccgacgggtgctaccggtgcaatgggtcctacaggagccaccggacctactggagcaacaggtccaacaggtgttactggatcgactggagcaactggagccacaggtcctactggtgctacaggtgctatgggtccaacaggagctactggccctactggtgcaaccggaccgaccggagtaacaggacctacaggtgaaactggtgctaccggaccaaccggtgctacaggccctacgggagttactggagctactggccccaccggcgtaactggtccaacgggagccaccggtgcaactggaccgactggagcgacaggtgcaactggtgctactggacctacaggtgttacgggtgccacaggtgttaccggaagcactggtgccacaggcccaaccggtgcaaccggtcctacaggcgcgacaggagccacaggagcaaccggcccaaccggtgttactggtgcaacgggtgccaccggaccaaccggcgtcactggtccaacaggcgctactggagccaccggagccactggagcaaccggagctactggagctactggacctaccggcgtaacgggagctgca

SEQ ID NO: 2261 - DNA, 729 bp, synthetic construct
  misc_feature 1..729: note = Description of Artificial Sequence: Synthetic polynucleotide
  source 1..729: mol_type = other DNA
ggtcctactggagctacgggacctaccggtacgactggtgcaatgggtccaactggagctactggaccaacaggaacaaccggcgcaatgggaccaacaggcgctacgggtcctactggtaccacaggtgccatgggtccaacaggtgctactggtccaactggtacaacaggtgctatgggacctactggagcaaccggaccaaccggtactactggtgcaatgggaccgactggcgccactggacccacgggaacaaccggtgctatgggtccaactggcgctactggacctactggagctactggtcctacgggcgtgactggtagtactggtgccacaggagccacaggagcaactggtccaacgggcgccactggcgccatgggccctactggagcaacaggtcctacaggagctacaggacctaccggagtgactggcgctaccggtccaacgggtgttacaggaccaactggtgcaactggtgccactggtcccacgggtgcaacaggagctacaggcgctactggaccgacaggcccgactggtgtcactggtgctgctggtgccaccggaccaactggagtaaccggtgcaactggtgttacaggtagtacaggagccactggagccactggtgctacaggtgcaaccggtcctactggagtcaccggtgccgctggagctacaggccctacaggtgccgctggcgccaccggtccagca

SEQ ID NO: 2262 - DNA, 630 bp, synthetic construct
  misc_feature 1..630: note = Description of Artificial Sequence: Synthetic polynucleotide
  source 1..630: mol_type = other DNA
ggtggtgcagaggaaaaagccatgaagccctctgagtctccagaatctgctaagaatgaggctggtggcgctgaggagaaggctatgaaaccctcgggttcggctgagtcggctaaaaacgaagctggaggtgctgaagaaaaagaaactaaaccttctgaatctcctgagtccgctaagaacgaggctcgcggtgccgagggaaaggaaaccaagccaagcgagtctccagagtcagctaagaacgaggccggaggagctgaagagaaagaaacaaaaccttctgagtctcccgagagtgctaagaacgaagctggaggagcagaagataaggctatgaagccttctgagtctgctgagtctgccaaaacagaagctggaggagctgaggaaaaggccatgaagccaagtgagtcgccagagtctgctaaaaatgaggctggtggagccgaagaaaccagcatgaagccatctggatcagcggaaagtgctaaaaacgaggcgggaggcgctgaagaaaaggagactaagccctccgagtccccagagtctgcaaaaaacgaggccagaggtgccgagggtaaagaaacgaagccttctgaaagtccagaatcggccaaaaatgaagca

SEQ ID NO: 2263 - DNA, 903 bp, synthetic construct
  misc_feature 1..903: note = Description of Artificial Sequence: Synthetic polynucleotide
  source 1..903: mol_type = other DNA
ggtgattctaacaccgatactaacactgataccaacaccgataaaaatttcgacgccaacactgatagcaatacagattcaaatactgaaacgaacaccgactccaacactgaaaccaacacagattccaacactgatacaaatactgattctaacactgacactaatacagacaaaaataccgacaccaacactgattctaacactgatactaatacagatacaaataccaatacggataccaatacggacactaataccaacacggatactttcacagataagaatactgattctaataccgacacaaacactgatacgcacacagacaccaattcggattccaatacagatactaacaaggacaccaataccgacaagaatacggatacaaatacagattctaacactgactcaaataccgatacaaatacggacactaacacagacactaacactgataaaaatttcgatgctaacactgattcgaacacggactctaatacagacaccaacacggactcgaacaccgaaactaatactgattcaaacacagacacaaacacggatagtaacactgatacaaacacggacaaaaatactgacaccaatacagactcaaacactgatactaacaccgataagaacactgataccaatacggattctaataccgataccaataccgattccaataccgatacgaatactgataagaatactgacacaaatacagactctaataccgacactaacacggattccaatactgacactaacatggatacgaataccgataaaaatactgatacaaagacggattctaatactgactccaatactgataccaatacagactcgaatactgataagaacactgacacaaagaccgattctaataca

SEQ ID NO: 2264 - DNA, 579 bp, synthetic construct
  misc_feature 1..579: note = Description of Artificial Sequence: Synthetic polynucleotide
  source 1..579: mol_type = other DNA
ggtgacatcagagatgcacgtgacgtgcgagacgctcgcgacataagagatatcagagacgcacgagatattcgagatccacgggacataagagacattagagattctagggatattcgagatattagagacgcaagagacatcagagacatgagagatcctcgtgatgttagagatgttagagatcctagagacgtccgtgatgtacgtgacatccgtgatgttagggatgttagggacatcagagactctagggaagtcagagacggtagagacgccagagaagtccgagatatcagggacgcgagggaggtccgagacatcagggacgctagagaagttagagacattagagacgccagggaggttcgagatattcgcgacccacgcgaagtgcgtgatacaagagaggtacgcgacgccagagaagtgagagacgctagagatgctcgtgaggttagagaggcacgtgaagctagagacgttcgtgatgcgcgagatgtacgagatattagagaagcccgtgaagttagggacgttcgagatgctagggaagtaagggatattagagacgttcga

SEQ ID NO: 2265 - DNA, 522 bp, synthetic construct
  misc_feature 1..522: note = Description of Artificial Sequence: Synthetic polynucleotide
  source 1..522: mol_type = other DNA
ggtaaagaatccgacagaagcaaggagagggaccgagagcgcgacagatctagggaaagggacagagaacaaggtcactctagagaaaaggaaagggagcattccaaggaacgtgaccgatctcgcggtcgtgaatctgaccgtggtaaggagtcagacaggggaaaggagagcgagaggggtaaggagagtgagagaggcaaagagtcagaaagaggaaaagagtcggagagaggaaaagagttcgatcgcggtaaagaatctgatcgaggaaaagaatccgatagaggtaaggaatcggatagaggaaaggaatctgaacgaggaaaagaatcagagaggggcaaggagtctgaccgtggtaaagaatcagataggggtaaagagtccgataggggtaaagaaagcgaccgtggcaaggaatctgatcgaggtaaggagtctgatcgtggaaaagaatcagatagaggcaaggaatctgaccgaggtaaggagagcgaccgtggtaaggaatcagaccga

SEQ ID NO: 2266 - DNA, 357 bp, synthetic construct
  misc_feature 1..357: note = Description of Artificial Sequence: Synthetic polynucleotide
  source 1..357: mol_type = other DNA
ggtagaccagagatgtaccctgagggtgttagaccaggaacggtcatttctggtgctgaacgtacttatccaggtggcgtcagacctggcactgttactcctggaactgaagaaatttacccaggtggtgcacgtcccggaacagtgacaccaggcatcgaggagatttacccgggaggtgtacgaccaggaacagttattccaggtgccgaaagaacgtacccaggaggtgtccatcctgacattgtcctaccaggagttgaaaagtcttatcctatagacatccgtccaggcacagttacacctggtgctgatggcatgtatccagaatctgtcagaccaggttcagtaacccca

SEQ ID NO: 2267 - DNA, 672 bp, synthetic construct
  misc_feature 1..672: note = Description of Artificial Sequence: Synthetic polynucleotide
  source 1..672: mol_type = other DNA
ggttctacaacccaaccaggttcgggatcaactacccaaccaggcagtggttctaccacgcaaccaggcagtggatctacaactcagcctggttccggatcgaccacccagcctggatccggctctacgacccaacctggatctggaagtacaacacagccaggtagtggttctactacccagccaggctctggttcgacgactcagccgggtagtggatctaccacccaaccaggaagcggctctactactcagcctggtagtggaagcactacccagcctggatctggttcaactacacaacctggtagtggatccacaactcaacctggttctggatccaccactcagccaggttctggatctactactcagccaggaagtggttctacgacacagccaggatcaggttccacaactcaaccaggtagcggttcaactacacagcctggttctggctccacaactcagcctggctctggttccacaacacaacctggttctggttctacaactcagccaggttccggatcaacaacccaaccgggatccggtagtacaacacaaccaggttcaggtagtacgactcagcctggttcaggatctaccactcaaccaggatccggatccactacccagccgggttctggttccactacccagccaggttca

SEQ ID NO: 2268 - DNA, 480 bp, synthetic construct
  misc_feature 1..480: note = Description of Artificial Sequence: Synthetic polynucleotide
  source 1..480: mol_type = other DNA
ggttctcctagaactacaacaggtggtggaatagcctacccaggtggtatcccgacgactacaacgggaggaggtattgcttacccaggaaacattcccaccactaccaccggaggaggtgtggcttatcctggtaatattccaacaacaacaactggaggtggcacggtttaccctggtggagtccctagtaccacgattacaggttctactgtctatccaggaggtgttccttctacaatcacgggtggtgatgttgcttatcctggagatgttccaagcacaactattactggtaccgtatatcccggaggtgtgtcctctgacggtgcagcttacccaggttctatgcccggcaccacgatcggaggtggcgttacttatcctggaagtattccatctactacgactggaggtggtatagcttactccggttcaatacctggaattacaactggtggtggagttacttacccacga

SEQ ID NO: 2269 - DNA, 630 bp, synthetic construct
  misc_feature 1..630: note = Description of Artificial Sequence: Synthetic polynucleotide
  source 1..630: mol_type = other DNA
ggtgttcctggaactattaccggcgcagatgctgttcatcccgaaggagttcctggtgcaacaaccggattgtcaattacgtatccaggtggcgtacctggtacagtgactggaggagatgttgtccaccctaagtccgcaccaggtactactacaggtagaggcgtcacctacccaggtggtgtcccgggaactgttacgggcggtggcgttgtgaacccaaaaagtgcaccaggaacaactacgggtcatggagtagcatacccaggtggcgttcctagaaccctaaccggcggatccacggtctatcctggaggagtctctggaattactacaggtggacatgttgcttatcctggtggtgtggcagctaccaccataggaggaaacgttgcctatccgggtggagtacctagcacaacaacgggtggtggtgttacatatccgggtggcgtacttggaaccaccacaggtgacggtgctgtttatccgggtggtttacctggaacagctactgtaggaggcattacctatcctggcattattagtggaactacgacaggatctggtatcgcatatcctggtggcgtacccggtacaaccactagcgacgatgttacatatcctgga

SEQ ID NO: 2270 - DNA, 480 bp, synthetic construct
  misc_feature 1..480: note = Description of Artificial Sequence: Synthetic polynucleotide
  source 1..480: mol_type = other DNA
ggtcatcatggtatcccatgggatacgatggaatatccaggaaccccatggaatacgttgggacatcatggcattccgtgggatactatggagtatcctggtacgccatggaatacacttggacaccatggaattccgtgggacactatggagtatccgggaacgccttggaataccttgggtcaccacggtatcccttgggacacaatggagtaccctggtactccttggaatacccttggtcaccatggcatcccatgggacactatggaatatcccggaaccccatggaacactctcggtcatcatggaatcccatgggataccatggagtacccaggtacgccatggaatactctaggtcaccatggcattccatgggatactatggaatatccgggcactccatggaataccttaggacatcatggtattccatgggacaccatggaatatccaggtacaccttggaacacacta

SEQ ID NO: 2271 - DNA, 480 bp, synthetic construct
  misc_feature 1..480: note = Description of Artificial Sequence: Synthetic polynucleotide
  source 1..480: mol_type = other DNA
ggtattcatcaagaggccacttcggaaattcaccctgaagccacttctgagatcccacctgagataacgtccgagattcatcctgaagctaccggcgaaattcaccctgagacgatttcaggaattcaccaggaggccacgtctgaaattcatccagaagccactagtgaaataccaccagagattactagagaaattcatccggaggccacgggagagattcatccggaaaccatatccggtatccaccaggaagctacatcagaaatccacccggaggctacttccgagattccacctgaaatcacctctgagatacacccagaggccacaggtgagatccatcctgaaaccatttcgggaatacatcaggaggcaacgtctgagattcatccagaagctacttccgagatcccgccagagatcactagagaaattcacccagaagccacaggtgaaatccacccagaaaccatctca

SEQ ID NO: 2272 - DNA, 414 bp, synthetic construct
  misc_feature 1..414: note = Description of Artificial Sequence: Synthetic polynucleotide
  source 1..414: mol_type = other DNA
ggtctgcctccgcaaaccacgagagagcttcattcccaatccgcctcagatttgcatcggccctcaacaagtcagatccatagaaggcctactagtaaaattcatccagacccaacttgcgagattcatcaagcctcaacctctgagaagcacccggaagcaacttgtgagatacatccggaatccacatctgagatcttaccagaaaccaccaatgacattcatcgaccatcagccaggcaaatcaaccgaccctcgacaagtgaaataccgcgcgagattaccagggaaattcaccctgaggccacctccgagactcacccagagactactaatgagatacacagaccgtcgacttctcaaatacaccgtccctccaccagccaaattttgcctgagacgaggagcgagtta

SEQ ID NO: 2273 - DNA, 729 bp, synthetic construct
  misc_feature 1..729: note = Description of Artificial Sequence: Synthetic polynucleotide
  source 1..729: mol_type = other DNA
ggtccttggtccaaatgctccaaacactgcggagaaggtggtgaacaatcccgtggtatcaagtgtgaacaagtcatatcgggtggaattccaactgtggttgacgactcccagtgtcttgaaaaagttggtcccaaaggccctaccaagcaagaatgcaacaagaacgttacctgtccacagtttcacgtaggaccgtggaaaccttgtgaccatctttgcggtccaggtaagcaaactcgaaaggttacgtgttacatgaaggtcaacggtaagatacagttgcttaaagatcaagcctgtgagggcgaagtacctaagtctgaaaagccttgtgagctaagaccatgtgccggtcttgactgggttacaagtgactggtctggttgtgacgacaaatgcggtctgactgaagaaactcgtactacatactgcgctacccaagacggaacagtttacccagatgagaaatgtgacgccgaaaagaagcctgagttgactagagattgcgaagctgagaaagactgtgagtttttgtggttcgcctctcagtggtccgattgttctgcaaaatgtggaagtggtgtccagacaaggaaagttttctgtggaaccttcgatgatgagactgtaaaaaaagttccagatgaaaagtgcgacgccgacaaaaaattcaatgaaactaagtcttgtatagcaaaggaggagtgtaagggagaatggttcgca

SEQ ID NO: 2274 - DNA, 390 bp, synthetic construct
  misc_feature 1..390: note = Description of Artificial Sequence: Synthetic polynucleotide
  source 1..390: mol_type = other DNA
ggtgcaacagccgagagcgccgctacaactgagccaggcgctacaactgaatccgctgcaactgaaattaccgagtctacagaatctggagctactgaggttaccgagtccactgaaagtggtgctacgaccgagtctggtgccaccactgagtctggtgctactactgagtcaggcgctactactgaatcaggcgctaccactgagagcggtgctactattgaatccggtgcaacaactgaaagcggcgcgactacggagagtggagctactactgaaagtggcgctaccacagagtccgctgccacaaccgaaccaggtactacgatcgaatccggagcgacaaccgagtccggtgctaccaccgaatccggagccaccactgaatca

SEQ ID NO: 2275 - DNA, 765 bp, synthetic construct
  misc_feature 1..765: note = Description of Artificial Sequence: Synthetic polynucleotide
  source 1..765: mol_type = other DNA
ggtattggtggtcaaacgggtgctggacagccaggttatggttctcagccaggagtggcaggccaaaccggagcaggacaacctggttacggttcacaacctggtgtagctggacagaacggtgctggtcagccaggatacggatcgcaacctggagttgccggtcaaaacgtcgcaggtcagcctggctacggaacacaacctggcattggtggacagacgggtgcgggtcagcctggctatggctcacagccaggtatcggaggtcaaacaggcggtggacaaccaggttacggttctcaacctggaattggtggccaaactggtgctggacaacctggttatggttctcaaccaggtgttggcggacaaactggcgccggtcaacctgaagtcggtggacagactggtgccggacaaccaggatttggagctcaaccaggcattggaggtcagacaggtgccggacagccaggctatggcactcaaccaggaatcggaggtcaaactggtgccggtcaacctggatatggatctcaaccaggcatcggtggacagacaggaggaggacaacctggatatggttcccaacctggaatcggtggacaaacaggtgccggccaaccaggatatggtagtcaaccaggtgtcggtggtcagacaggtgctggtcaacccggttatggatcccaaccaggtgttggaggtcagaccggagctggacagcctggatatggttcgcaaccaggtgtgggaggtcaaaca

SEQ ID NO: 2276 - DNA, 543 bp, synthetic construct
  misc_feature 1..543: note = Description of Artificial Sequence: Synthetic polynucleotide
  source 1..543: mol_type = other DNA
ggtgttggaggacaaactggtgctggtcaaccaggttttggcgcccaacctggaattggaggacagactggagcaggtcaaccgggatacggtacccaacccggaattggaggtcagacaggtgctggacagcctggttatggatcgcaaccaggtgttggtggacagacaggcgctggtcagccgggcgtgggaggtcagaccggtgctggtcaacccggttttggtgcacaacctggcattggaggtcaaactggtgcgggacaacctggatatggtactcaacctggtattggtggtcaaacaggagctggacaacctggttatggtactcagcctggtatcggtggacagacgggatctggccagccaggttacggatctcagccaggtataggtggacaaacgggtgctggtttgcccggttatggaacacaacctggaattggcggtcaaaccggagcaggtcaacctggatacggcagtcaacctggagtcgccggacagacgggagctggtcaaccaggctacggtactcaacca

SEQ ID NO: 2277 - DNA, 816 bp, synthetic construct
  misc_feature 1..816: note = Description of Artificial Sequence: Synthetic polynucleotide
  source 1..816: mol_type = other DNA
ggttatggttcgacgcagactgcaggcggtgattctgcactaacagcaggttatggttctactcaaacagccagggaaggtagtaatctcacagctggctatggctcgaccggaacagccggttcagattctagcctcatagctggttacggatcaactcaaacttcaggagaagattccagcttaactgctggatatggatctacacaaactgctcaagagggatcaaatttgactgctggttacggtagtaccggaacagcaggatcggacagctctttgatagctggatacggaagcacacaaacatcaggaggcgacagttctttaactgctggttacggctctactcagactgctcaggagggatccaatctcacttcaggttatggaagtactggcactgccggagctgattcaagtttgattgcaggatatggttctacccagaccagtggttccgactctgccctgaccgccggctacggatctactcagaccgcacaagaaggatctaatttaaccgctggatacggatcaactggaaccgctggcagtgattcttcgttgattgctggttatggatcaacccaaactagtggttctgatagttcgttgaccgcaggatatggttccacacaaactgcacaagaaggctcgaatttaaccgcgggctacggatcaactggtaccgctggtgttgattcttctctgatagcaggttatggatcaactcaaacatctggttctgattctgctttaacagcaggttacggatctacccaaactgcccaggagggttccaacctgacagca

SEQ ID NO: 2278 - DNA, 450 bp, synthetic construct
  misc_feature 1..450: note = Description of Artificial Sequence: Synthetic polynucleotide
  source 1..450: mol_type = other DNA
ggtgctggattaaatgcaggagctggtcttaatgctggtgcaggtcttaacgctggagcaggcttaaacgctggtgccggactgaaagtcggtgcaggactaaatgcaggagccggtctgaatgtaggagcaggccttaataccggcgccagattttctgccaatgctggtttgaaggcttcagctggactaaatgctggtgccggtctgaacgctggcgcaggactcaaggtgggtgctggtctaaacgctggagccggactgaatgtgggtgctggtttaaacactggtgcaggtttaaacgctaacgcgggattgaaggctaacgctggacttaacgctggtgctggattgaaagttggagccggattgaacgtcggtgctggactaactgccggaactggtttaaatgccaacgctggactgaaggcaaatgctggtttaaatgca

SEQ ID NO: 2279 - DNA, 591 bp, synthetic construct
  misc_feature 1..591: note = Description of Artificial Sequence: Synthetic polynucleotide
  source 1..591: mol_type = other DNA
ggtgtttgcggatgctcaggtggtcgacagctagttaatggagtttgcaaatgcacaggtggccaggaattggttggtggatcgtgtgcttgcacttgcggtcaagagttagtaaacggagtctgtacttgtccaggaggtcaaaaattggttggagacaaatgtatgtgtactggtggacagactatggtcaatgatgtttgtgcctgtactggtggccaaaccttggtggacggagtttgtgcttgtaccggcggccaaaagttggtcgacggagtttgtacttgcactggtggtagaagtttggtcgatggagtgtgcgcttgcacgggtggacagcttttcgctaacgacgtttgtgcctgcccagccttaatgtctctaaagaacggtgagtgctcctgtgacggcggtagagctgaagttcgccctgatgtctgcgagtgcacaggaggacaagagatcgcaaacggtgaatgtgcatgtacgggaggacaaactctcgtggatggtgtgtgccgctgcccttcgctcatgtcgctggaacatggtgtttgtacctgtgatggtggcaggactgaagttagcaca

SEQ ID NO: 2280 - DNA, 516 bp, synthetic construct
  misc_feature 1..516: note = Description of Artificial Sequence: Synthetic polynucleotide
  source 1..516: mol_type = other DNA
ggttccacaactacgtccggaaatggatctggcacctcatcaaccacgaccaacaatggttcgggtgccggctccaccactacctccggtaatgactccggagtgggttcgactactacctctggtaacggttctggagctgagagtaccactaacggcaatgatagtggagtgggctctacaacaacctcaggagctgcctcaacggctacgtcagccaatggtagtggcgccgagtctactaccactagtggaaacggttcaagctctggttccactactacaagtggtaatggctcgggtgcagcttcaactactaatggaaatgactctggtgtaggttcaacaacgaccagtggtgctgcctctactaccacgagtggtaatggatctggtgtcggttctacaacttctagtggtaacggttccggaaccggttcgacctcatctggtattggaagtaccacgacttctgtgaacggtagcggaacaggtactacaaccagctcgggtata

SEQ ID NO: 2281 - DNA, 468 bp, synthetic construct
  misc_feature 1..468: note = Description of Artificial Sequence: Synthetic polynucleotide
  source 1..468: mol_type = other DNA
ggtggtttgggagtgggaggactcggcgttggaggcggattgggtggcggatcgcattactcttcatcctcgtactcttctggtcatggatctggtgtaggcgttggagcaggattggcatcaggagctgctctcggcagtggtgcaggattagctaccggtgcagccctgggctccggagctggtcttgcaagcggagccggtctaggttacggtgcaggtcttgcttcaggagctgcacttggatctggtgctggtctagcaacaggcgccgcccttggaactggtgccggtcttgcctctggcgctgctctgggtagtggagcaggcctcgctactggtgcagctttgggttcaggagcaggactagctgctggtgctggactgggttatggcgccggccatgcctcgggagctgctctaggttctggagcaggactggcttctggagccgctttaggatctgga

SEQ ID NO: 2282 - DNA, 645 bp, synthetic construct
  misc_feature 1..645: note = Description of Artificial Sequence: Synthetic polynucleotide
  source 1..645: mol_type = other DNA
ggtactggtgtttctggaggtccaggttacccaggaaccgtcggagctggacagtaccctggtgtaggcggattgccaggaacttccggacagtacccgggtggccaatacccaggtactggtgccggaggagtcccaggatattctggttaccctggtactagcggagccggtcattacccaggaacgtcaggcacgccaggtgccggaacaggacctggaactggaggtattggtcagcatggtggccagctgtctaccggaactggcgccggcgtaggacatcagggtagtggcgtaggtcaataccctggtacgggtgctactggtggctacccgtatccaggtacaaccggtcagtaccctggaacttctggtatcccaggtgcaggtactggtcaatattacccaggtggtactggagtaggcggtctacctggtggtgttggtcaacacggaggacaattgtccacaggtgcaggaacaggactaggtcaacaaggtggaggagtcggtcaatatccaggaactggcgttggtggtggaccaggatacccataccatcatggtacttcaggtcagtatccaggtggacaataccctggaactggagctgctggaggcccaggatatacaggataccca

SEQ ID NO: 2283 - DNA, 420 bp, synthetic construct
  misc_feature 1..420: note = Description of Artificial Sequence: Synthetic polynucleotide
  source 1..420: mol_type = other DNA
ggtccagctccatatccaacggccccaggtggtgtaggaaagattacctatccggtaggtccaggaggtgttccaggctaccctggaacccccacttatccatcaatccctggatatccaactcctggacacccagtaactgaaccgggataccctggcgtgccatcctatcctggcgctcctagaccaggtgtgccttctggtccatctggtccgagctaccctggtggtcaaattccaggatatcctggtgtcccttccccaggattcccaggaggacctccgcctggatacccaggagtgccaaccgctggttatccaggtattccaacaggcccaggtgttccgtcatacccaggtggaccttccgtgtcatttcccggagttccatcagtgcctccaggagttccgagttaccca

SEQ ID NO: 2284 - DNA, 624 bp, synthetic construct
  misc_feature 1..624: note = Description of Artificial Sequence: Synthetic polynucleotide
  source 1..624: mol_type = other DNA
ggtgcaccatcaccaggttaccctggtgccccaagttcaggataccccggtgccccgtcccctggatacccaggtgccccttctccaggatacccgggtgctccaagtccaggatatcctggagccccatacccaggttacccggaagctcccactccttcatatccaggagctccaactccaggttatcccggtgctcctagtccaggttacccgggagctccagctcctggatatccggaagcaccatacccaggttatcctggtgttccaagcccgggatatccaggagcgccatctccgggttatccaggtgcgccgtcccctggttacccaggtgctcctagttcaggatacccaggtgcgcctagcccgggataccctggcgctccatctcctggttacccaggagccccatctcccggatatccaggagccccttatccaggttaccctgaagctcctactccatcctaccccggtgctccgacaccaggttatccgggagcccctagcccaggatatccaggtgccccagctccaggttacccagaggcaccatatcctggttaccctggagtcccttcacctggataccctggtgctcctagcccaggttatcca

SEQ ID NO: 2285 - DNA, 795 bp, synthetic construct
  misc_feature 1..795: note = Description of Artificial Sequence: Synthetic polynucleotide
  source 1..795: mol_type = other DNA
ggtcttacaggtccagccggtcaggacggaaagcagggtccacagggtcctcgcggtttgacaggtcctgccggccaagacggaaagcaaggacctcagggaccaaggggattgacaggcccagctggtcaagatggtaaacagggaccacaaggtcctcggggtttgactggtccagctggtcaggacggtaaacagggtcctcaaggaccacgtggtttgactggtcctgccggacaggatggcaagcagggaccaagaggactgaccggaccggctggtcaggatggtaaacagggccctagaggtttgaccggtccagcaggtcaggacggtaagcaaggacctcaaggtccacgcggactgacaggtccagctggtcaagacggaaaacaaggaccacagggtcagcctggacaagttggtcctagaggtctacaaggtccccagggtccacgtggagataaaggagagactggaccacagggtccagcaggcaaagacggcgaggctggtgctcaaggtcctgtaggtccggctggtccgcaaggacctcgtggcgataaaggtgaaactggtcctcaaggacctgctggaaaagatggcgaaagaggtcctgttggtccagccggtaaagacggtcaaaatggaaaggacggattgcctggcaaagatggtaaggacggacagaacggaaaggatggtctacctggaaaggatggtaaggacggccaggatggtaaggatggacttccaggtaaggacggtaaagatggacagccaggaaagccagca

SEQ ID NO: 2286 - DNA, 540 bp, synthetic construct
  misc_feature 1..540: note = Description of Artificial Sequence: Synthetic polynucleotide
  source 1..540: mol_type = other DNA
ggtgacaccggacctactggtcctactggcgcttctggtccttcaggtgagactggacctacgggaccaacgggtgtttctggacctagtggagaaacaggtccaactggacctactggtgcctccggtcctagtggcgacactggcccaactggtccaactggtgcttccggaccttcgggcgatactggccctactggtccaactggcgcaagcggccctagtggtgagacgggaccaacaggtccaaccggagcatccggaccttcaggcgagactggtccaaccggcccaacaggcgcatccggtccaagcggtgaaactggtcctactggaccaacaggtgcttctggtccatcaggagagactggtcctacaggtcctaccggtgtatcaggtccatccggtgatacaggaccaacgggaccaactggcgctactggcccttctggcgagactggtcctactggtcctaccggcgccactggtcctagtggtgaaactggtccgactggtccaactggagctactggcccttca

SEQ ID NO: 2287 - DNA, 822 bp, synthetic construct
  misc_feature 1..822: note = Description of Artificial Sequence: Synthetic polynucleotide
  source 1..822: mol_type = other DNA
ggtaaccaaattcttgatcctcgtacgtgcgtttgtaagaagtgtattgctactgcctgtcctgataattcgcattattctttctctacttgtagatgcgaatgtccacaacaccagaagtgccctcatggtcagtactttaattccgagacatgcaaatgtggatgttcccctcatatcaaatgccacagtcctagggtcctgaacaaggatgcttgtaagtgtgaatgcccaaagaacgtacactgtttaccacctttaacttttgatgagagaacatgtgcatgccactgtccagaacaccactcccactgccctacaggtaagatttattcttacacagaatgcggctgtatttgctccgagaaagcttactgtcatcttcctagattttttaacaacgagacttgtaaatgcgagtgtaagggtgaaaggaactgtgtacatcctaaggtctactccgagacgaactgtaattgtcaatgtccagaagatgactactgtccgcggcataagaccattaaccctgaaacctgtgaatgcagttgtccagcagaactcagctgtagaagtccacaagtgctaaacgacaaaacttgcaagtgcgtgtgtccaccacatactagacgatgcccaccaggaaaggagcttgatgatttcacctgtgagtgtagttgtcctgaggttttttgtcctttgccgaagctgcaaaacccttatacctgtaagtgtgcttgccctgataccctgacctgtccttacggacaagttgtagatccagagaactgtcagtgttcctgtccaaaaaaactatcctgttca

SEQ ID NO: 2288 - DNA, 486 bp, synthetic construct
  misc_feature 1..486: note = Description of Artificial Sequence: Synthetic polynucleotide
  source 1..486: mol_type = other DNA
ggtaatcaggatcatggttacggtgtcaggccattagtcgacggtcaataccgcggctctggtactaataacaaacttccgggtaaccagtatcaaggttatggtattacaccttctattgacggacaatacacttctagtggtacaaacaataagttgcctggaaaccaaaatcagggatacggaattaacccttccatagtgggtcaatatccgggattgggcacgaataataatttgccaggaaatcaggatcacggttacggcgttagaccattggttgatggtcaatataggggaagtggaacgaataacaagctgccaggtaaccaataccaaggatacggtattactccttctatcgatggtcagtacacctcctctggaacaaacaataaactgccaggtaatcaaaaccaaggctacggaattaatccttctattgtgggccaatacccaggtttaggcacaaacaacaaccttcca

SEQ ID NO: 2289 - DNA, 495 bp, synthetic construct
  misc_feature 1..495: note = Description of Artificial Sequence: Synthetic polynucleotide
  source 1..495: mol_type = other DNA
ggttcaggcggttcgggtgttcagcagagtggtaacgtaccatctggagttaatatcaatcaaattcaaccatcctatggacaaccgcacggtacactttacagtggtggaaccggtgtgcagcaaccaggctatgcatcttcgggtgaaaacttgaacccgattcaaccttcatatggtcaacctcacggtaccttaggtagcggtggctctggtgttcaacaaagtggtaatgttccttcgggtgtcaacattaatcagattcaacctacctacggccagccacaaggtaccctaggttcaggaggatcgggtgtccaacagagtggtaatgtaccgtcaggaggaaacttaaatccaatacaaccatcctattcccagcctcacggtacactgtatagtggtggtacaggtgtccaacaaccgggttacgctagttccggaggtaacttgaacccaattcaaccttcttacggtcaacctcatggcacctta

SEQ ID NO: 2290 - DNA, 804 bp, synthetic construct
  misc_feature 1..804: note = Description of Artificial Sequence: Synthetic polynucleotide
  source 1..804: mol_type = other DNA
ggtggcgacctccctgataaacctattccaggtggtcaggaagaggttgaaagaccttggccagaaacgggagatcttcctgataagccgattgagactgatcagtttgataccacagctggacctagtttctgggataccactcattctgatcacactgagtcaatggaaatattcgaagttccaccgaatgagattgatgacggtggtgatctgccagacaaaccaatacctggtggacaggtggaacaaccaggaccaggcatcgacggtctgccagataagccaattgagacggatcctttcgacactactactgatggctccttttgggacacaacgcattccgaccataccgagcctatggaaatatttgaagtccctggttcagaaatcgatgatggcggagatttgccagataagccgatcccaggcggtcaggtcgagcaaccttggcctggtccagatgacttgcccgataaacctcttaacattgaccctagtgatacaacaactgattctagcttctgggatactactcactcagatcataccgtgccgatggaggtgtttgaggtcccaccaaacgagatcgatgaaggcggaggattaccagacaagcctataccaagtgatagagatcatgttgagcagcctgagcctgagactggtgacttgccagataaaccaattggaatcaacccttcagatactactactgattcttcattctgggatactacccactttgatcatactgtccctatggaaatcttcgaggttcctccttctgaaatcgacgaa

SEQ ID NO: 2291 - DNA, 1017 bp, synthetic construct
  misc_feature 1..1017: note = Description of Artificial Sequence: Synthetic polynucleotide
  source 1..1017: mol_type = other DNA
ggtggagttgtgccagtgatccctggaggaccaaatataccaggtggtcctggagatccaataggtcctggtggaccagttgaaccaggaactcctgaaggtccagacggtccgggaataccaggaggtcctaacggtcctggcggaccgggaattactgaaggtcctaatgagagtaatcatcttactactaagatcccaatcactactaccacagatagaaacggaggtggagtagttccagttttacctggcggtccaggtggtcctcgcaaaccaggtggtcctagtggcccaaatggccctggtaatcctggtggacctgttaatccaggtggtccgactggtccagatggacctggaaacccaccaggctctgagacaccaggaggttctggaacgcctattggacctaacggtccagttggaccaggatcaccggatggtccacgtggtccttcaggtcctgatggaccgaaaggtggcacacagaatacaggatcccctagtggtccttctggaccggataacccaaatggacctggaggcccatcgaacccaggtggtccgagtggtccaactggacctgaaggacctgacgaatccaatcggttatcgaccaaaattcccataacctcgaccaccacagatagggttggtggcggtattcctgtgattccaggtggacctaacattccaggtggcccgcgaggacctagcggaccgtccatccctggcgagccagcgggtcctgacggatcaggaggtcctggtggtccagttaatccgggaggtccgaccggtcctcatggtcccggaaatccacccggtccatctattccgggcggacctggaggacctgacggtccaggatcgccatcaggtcctagtggtcctgattctcctggctcgccaaatggtccttctaacacaggttcccctagaggtccatctggtccagatggtcctaaccagcaaccaacatctaaaccggagaagcaaaacgaacaatcttca

SEQ ID NO: 2292 - DNA, 840 bp, synthetic construct
  misc_feature 1..840: note = Description of Artificial Sequence: Synthetic polynucleotide
  source 1..840: mol_type = other DNA
ggtaccaattctactgcaagcggagataattctacagcttctggaactaacgcttccgccaccggtgaaaactctactgcgtcgggtacgaatgcttctgctactggtgagaactctactgctactggaacagcctccacagccagtggttcaaactctactgctaacggtaccaactccacggcatcaggagagaatagcacagctaccggtacggatagcactgcttcaggaagtaattctactgctaatggtactaattctaccgcgtcaggagacaatagtacagcctcgggaactaacgcctccgcgacgggagagaactcgaccgctacaggaaccgattcaactgcatctggttctaactccactgctaatggcacaaattctactgcatccggtgacaattcaacggcctcgggcactaatgcgtctgcaactggtgagaacagcacagctacaggcactgactctaccgcttccggttctaattcgacggctaatggagctaactccacagcctcaggagataattccaccgcttcgggtacaaacgcctccgcaaccggtgagaactctacggctactggcactgattctactgctagcggttcaaatagcacagcgaacggaactaatagtactgcctcaggtaacaattctacggcaagtggaacaaatgcatccgcaacaggtgaaaattctacagcaaccggaacggactcagcagcttccggtacaaactcaacagctaacggtactaacagtactgcctcgggagataactcaactgccagtggtacaaatgctagcgctaccggcgaaaattctactgctaca

SEQ ID NO: 2293 - DNA, 750 bp, synthetic construct
  misc_feature 1..750: note = Description of Artificial Sequence: Synthetic polynucleotide
  source 1..750: mol_type = other DNA
ggttcgggattgagtggagtttctatggctggtagcgaatgttctggagcatcaatggctggatcgggtcattctagagtctcagtcgcaggatctgagtatactggtgcttcgatggcaggcagtggtcatagcagagcctcaggagcaggatctgaatggagtaggactagcatggccggttctggactctcaggcgtttcagtcgccggttctgagtaccctggagctagtatggctggttccggtcactccggtgcccctgtttcaggtagcggatcctccggagcaagcatggcaggatctggactttctcgtgcctcaggtgccggatcagaatgttccagaacatcggttgctggctcaggtcattctagaacgtctgtagctggatccgaatgttcacgggtttcacgagcaggtagcgaatgctccagggcttcggttgccgattctggatactctggagcatctgaggtaggttcaaggtcaagcagagcatctcttgctggattagtacacttcggagcttctattgcatgcagcggtcattctgaagcaagtatggaaggtttggaatgttccggcgcctccgttccagactcaagacattctgtcgctagcgtaacggatggtggtcactctgtagcttccgttgctgactcagtgcatagtgttgttagtatgactggtttaggacagtttgtgtcctccgtttctgaacctggtcatagtactgcctctgttgca

SEQ ID NO: 2294 - DNA, 456 bp, synthetic construct
  misc_feature 1..456: note = Description of Artificial Sequence: Synthetic polynucleotide
  source 1..456: mol_type = other DNA
ggtattgcaactccgagtgataccaactcttatgagtccaccactacagtgactgacatgaccacgtcaacacataccactgtcgttactacaacctggttggtgacaaatagtgacggctctgttgaaaccgagacgggaatcgcgacaccttccgacactaatagttatgaaagtaccactaccgttaccgacacaacctttactacggaaacaaccgttatcactaccacttggttagtgacgaagtccgatggttccgtcgaaactgaaactggtgtgattactcagtcgggtgattcaagtagcactatcactacgtttgagacatcaagtgacacgaacagttacgattcaacaactactgttacggatactaccacaacaacggaaactactgtttttaccaccacatggatcgttactaaatcagatggcagcgtcgaaacagaaaca

SEQ ID NO: 2295 - DNA, 1080 bp, synthetic construct
  misc_feature 1..1080: note = Description of Artificial Sequence: Synthetic polynucleotide
  source 1..1080: mol_type = other DNA
ggtgaacctactggtagcggttctgaatccaccggagaaccgaccggagagccttctggatcaggatctgaatccaccggtgaaccaactggagaacctacaggagagccatctggttctggatcggaaagtactggtgagccaactggtgagccatctggttcaggttctgaatctgctggtggatccagcactccaggatattctgtttctactaccactgatactactacaactacagagacaaccaccactactactaccaccacatggactgttactaagtcagatggaagtgtcgaaacagaatccggtattgttagtggctctgatagtagtctgacgacaatcactacatttgaaccaccatcgagttcctctggatttggtactgaaagcggcctgattacggatacgaacaacgagtcatctgcgggatctactggtggcgcctccgagccgactggaggtgcctcggagtccaccggtggagctagtgagcctacaggagaacccacaggtggagcctccgaaagcacaggtggtgcatcggagccaaccggtgaaccaagtggtggcgcctcagaaagtactggaggagcaagtgagccaaccggagagccaactggaggtgcaagtgaatcaactggtggtgcatctgaaccaactggtggtgcttccgagagtacaggaggtgctagtgaacctacaggaaacggttccgaaagcacgggtgaaccaactggcgagccgacaggtggtgcctcagaatctactggaggagctagtgaaccaacgggagagccaacgggtggcgcttctgaatctaccggaggtgcatctgaaccgactggagaacctactggaggtgcttcagaaagcaccggaggagcttccgagcctactggagagccaaccggaggtgctagtgagagtactgatggtgcttcggagcctactggtgaacctacaggaggagcttctgaatcaacgggaggtgcttcagagccaaccggtgagcctactggtaacggctccgagactactggtggatcttccactccaggatactcagtatca

SEQ ID NO: 2296 - DNA, 633 bp, synthetic construct
  misc_feature 1..633: note = Description of Artificial Sequence: Synthetic polynucleotide
  source 1..633: mol_type = other DNA
ggtgataatggaactggatcaggtaacaccggtgataatggtacgggctccggcaacacaggagataatggtaccggatccggcaacaccggcgataacggaactggttcgggaaacaccggagacaacggtacaggtgctggcgacaatggtacaggtgctggagataacggcactggttctggtaacactggagataatggcactggatctggtaataccggtgacaatggcactggttctggcaacacaggtgataacggcacgggatccggaaataccggtgacaacggaaccggtgctggtgataacggtactggagctggagacaatggtaccggaagtggtaacacaggagacaacggtaccggatccggcaatacaggtgacaacggtactggttctggaaataccggcgacaatggtaccggtgctggtgacaatggcaccggagccggtgataacggaactggatctggaaatacaggcgacaacggaactggtagtggaaacacaggtgataatggaacaggtgcaggagacaacggaacaggatctggtaatacgggtgacaacggaactggcgctggcgataacggtacaggttccggtaacactggtgataacggaaca

SEQ ID NO: 2297 - DNA, 693 bp, synthetic construct
  misc_feature 1..693: note = Description of Artificial Sequence: Synthetic polynucleotide
  source 1..693: mol_type = other DNA
ggtgcccaaggtccacagggtgttcagggtgtccaaggtgatcaaggtcctcaaggtgttcaaggtgctcaaggcgaccaaggaccacaaggcgttcaaggagttcaaggagatcaaggacctcagggcgtgcagggagtacaaggtgaccaaggcccccagggtgttcaaggtgttcagggtgatcagggacctcaaggcgtgcagggtgttcagggagatcaaggtccacagggcgttcaaggagcccaaggtgaccagggtcctcaaggtgtgcaaggagtgcaaggtgatcagggcccccaaggagtccagggagttcagggtgaccagggtccacaaggagcgcaaggtgtgcaaggtgatcaaggaccgcaaggagtacagggtccgcagggtgatcagggtccacaaggtgtccagggtgttcaaggagatcagggaccacaaggtgttcaaggagtgcaaggtgctcaaggtcctctgggtcctcaaggtatccaaggtccgttgggagcacagggcccattgggtcctcaaggtgctgagggtccattgggtgcccaaggccctcttggccctcaaggtgcagagggtccactaggagctcaaggcccattgggtccccagggtgcagaaggtccccttggtgcacaaggtcctcttggtccacagggtgctgaaggtccatta

SEQ ID NO: 2298 - DNA, 1002 bp, synthetic construct
  misc_feature 1..1002: note = Description of Artificial Sequence: Synthetic polynucleotide
  source 1..1002: mol_type = other DNA
ggtataggaggaatcccaggcgctgtacctggtactggactgggaggcgttcctggactcacccctggtggaggcgccgtacctggtgttgtgccaggtcttgtgcctggagctggtggtgttcctggtgcaggtataccacaacttggagtacaaccaggtgccaaagcctctaaatacggattgcctggagttggaggtgtgccaggtgtcggaggtgttccaggtgtaggaggtgtgcctggcgttggtggagttccaggcgttggtggcgtcccaggtgttggtggtgtcccaggcgttggaggtgttccaggaccaactatttctggactaggtgcaaaaccaccaaagataggtggagtcggtgccggaggttttccagctggagtgggcgtcggaggtgtcccaggtgccggtgcttaccctgctggaggtaaacctccaaaaccaggatatggagctggagctggactgattccaggaggtggtattactcctggagctggcttgggtgctggtcttgttcctggagctggaacaggagctggactctaccctggaggtaagcctcctaaacctggatatggcttgccaggcggtgcacttacaccaggagcaggactgcaaccaggcgccggtttgcagccaggtgctggactgcagccaggagcaggattgcaacctggagccggcttgcaacctggtgcaggcctccaacctggagcagcaactggtgccggtacatacccaggaggtaaaccacctaagcctggtcttggtattggcggacttacacctggtgttgctggtctaggaccgggtgccggactggtgccaggagcgggaggtttagctccaggtgccgccggaggtgcataccctggaggaaaacctccaaagccgggcgccggcttagttcctggtgccggaggcctcgctccaggagctggaggtttggctccaggcgccggtggccttgttccaggtgccggcggatta

SEQ ID NO: 2299 - DNA, 876 bp, synthetic construct
  misc_feature 1..876: note = Description of Artificial Sequence: Synthetic polynucleotide
  source 1..876: mol_type = other DNA
ggtggaatcgcaacgggcgttgctccaggtggagccggtggtctgtacccaggtgcaggaggaaagccaccaaaacctggatacggtccaggagctggttttgtgccaggtgcaggaattggtgccggcgccggagctggattacaacctggtggaatcggagcaggagttgctccgggtggtgtcggagctggtggactctatccaggagccggtggaaaaccacctaagcccggttatggacctggtgctggttgggtccctggtgccggagttggcttgggtactggagtccagccaggaggtactggtacaggcgttgccccaggaggaatcggcgctggcggactttatcctggtgcgggaggtaaacctcctaaaccaggatacggacttggcgccggattagtgccaggagctggtgtgggtcctggagctggtctgcagcctggaggcatcggtgccggtggtgtcggagccggtggattgtacccaggtggtaaaccacctaagccaggatacggacctggtgcaggttacgttccgggtgcaggttatgtaccaggtgcaggagtcggtcctggagccggtctacaaccaggaggcattggtgctggtgttgcccctggtggtgttggcgctggaggtttgtacccaggaggtaaaccacctaaaccaggttacggacctagagccggactgggtacaggcgctggtatcggcgctggactccagccaggcggaattggagccggagtggctccaggaggtgttggtgctggaggactatatccgggtggtaaaccacccaagcctggatatggtccaggtgccggttttgtcccaggtgttagcaatggagctggacagcaacca

SEQ ID NO: 2300 - DNA, 756 bp, synthetic construct
  misc_feature 1..756: note = Description of Artificial Sequence: Synthetic polynucleotide
  source 1..756: mol_type = other DNA
ggtggtccaggtggagcaggaggccctggtgttgatgcacacggtcgacctactggtggctctggtacaggaggacctctggtagatgcatacggacgacctatctcaggtggtcatggtggtagacccgccggtggctcaggaacttcgggtggaccaggtgtcgacgctcatggtcgtcctattggtggtagtggaaccggaggtatcgacggtcaaggtcgtccatccggaggtaccgctgtggacgcctacggaaggccgattggtggtccaggaaccggatcaccaggtagcggtggtgcaggtaccggagttcctggtgtagatggtagaggcagaccttctggaggtccaggagtggatgcccatggtcgaccaattggaggtacgggagcaggcggtcctggtacaacaggtactggcaccggtggtggagttgatgcttatggacgtcctatcggaggtcaaggtactaatggtcacgacgcaaggggacctccagtcgattcacatggacgtcctattggaggtcctggaactggaggattaggttccccaattggaaccggtatcggcggtgttgacgcctacggtcgtccttctggacctggcggacaaggatctggtaccccaggaggtgcacctggtcactcgggactaggtacaggaggtcacggtgtagatgctcacggacgacctattggaggaccgggtacgggcgtctcaggtgttgatgctcatggacgtcccata

SEQ ID NO: 2301 - DNA, 729 bp, synthetic construct
  misc_feature 1..729: note = Description of Artificial Sequence: Synthetic polynucleotide
  source 1..729: mol_type = other DNA
ggtgtcggccagtatccttctggtacaggtgccggtcaatacccttcaggtactggtgcaggacaatacccttcaggaaccggaggaacatctggtactggtcagtatcctggtggtactggtgccggacaatatccaggtggcattggcggaaccggtggcgtgggtcaatacccaggtagtaccggaacaggtcagtatccaggaggaactggcggtacaggtggtgctggtcagtatcctagcggcacaggtgctggacagtatccatctggtactggtggtaccggtggtgcaggacagtatcctggttcaaccggtgttggacagatacctggaggaacaggtcattatccatccggcacgggtgctggtcagtacccttccggaacaggaggtaccggaggtgctggacaataccctggatctacgggtgctggtcaacatcctggaggccttggtggtacaggtggtacgggacaatatccatctggtaccggtgcaggccagtacccatccggtactggaggtactggtggagcaggtcaatatcctggttctggacaatacccatcaggtactggaggtaccggttctgctggtcaatatcctagtggaactggcggagcaggacaatatcctaccggaacgggtggagccggaggagtaggacagtacccttctggcaccggcgctggtcaatatccaagtggcactggcggaattgga

SEQ ID NO: 2302 - DNA, 663 bp, synthetic construct
  misc_feature 1..663: note = Description of Artificial Sequence: Synthetic polynucleotide
  source 1..663: mol_type = other DNA
ggtattggtggccagacaggtgcaggtcaaccaggttatggtagccaacctggaattggtggtcagacaggcgctggtcaacctggatatggatctcaacctgttgttggtgctcaaacaggcacaggacagcctggttatggagctcaaccaggtgtcggtacacaaactggtgctggtcaaccaggctatggttcacaaccaggtatcggaggtcaaacaggtgctagacaaccaggttatgtcacccaacctggagtcggtgctcaaactggaatcggacaaccaggttacggagctcaacctggtattttaggacagactggtgctggacaaccaggatatggttctcagccaggtattggcggacagacaggtgctggacagcctggttacggcacccagccaggagtgggtgctcaaactggcaccggtcaacccggttatggcgcccagccgggtgtgggtacgcagacaggcgcgggtcaaccaggatacggaagtcagcctggtattggaggacaaaccggagccggacaacccggctatggaacacagccaggtgtgggagctcaaactggtgcaggccaaccaggctatggagcacagcctggtgttggtgcgcagactggtgctggccagccaggttacggttcgcagcca

SEQ ID NO: 2303 - DNA, 768 bp, synthetic construct
  misc_feature 1..768: note = Description of Artificial Sequence: Synthetic polynucleotide
  source 1..768: mol_type = other DNA
ggtatcggtggacaaactggaggtggacaacctggatatggttctcagattggcggtcagactggtgccggtcaaccatcatatggttcacagccaggagtgggcgctcaaaatggagctggtcaacctggatacggaactcaacctgtgattggtggacaaacaggcgctggacaaccaggatatggcggccagacaggagtgggtggaagccctggttttttgacccaaccaggcattggtggcatttctggacctatcggtggaaagttaggcggtggtcaaagcgaggcagcaaagccaggatattgggcacagccaggaattggtggaccatccaggtacggatctcaaccaggtatcggtgatcagactggtaccggtcaatccggatacggtggtcaaccaggaatatctggacaaacaggaggtggacaaccgggttatggaggccaagctactatctccggtctgcctggatacggtacacagccaggtatcggtgccttgaccgcagttcctggtggtcattatggttacgagactcaacctggtattggtggccagactggaacaaaccagcctggttttggtggtcagcctggaataggtggacaaaccggagcgggacaacctggttatggtttcatcggtcaaccgggtattggaggacaaaccggaacctccggtcgccagccaggttacggtacacagcctggtatcggtggtcagactgcagccggtcaaccaggatacggctctcaaaca

SEQ ID NO: 2304 - DNA, 756 bp, synthetic construct
  misc_feature 1..756: note = Description of Artificial Sequence: Synthetic polynucleotide
  source 1..756: mol_type = other DNA
ggtgctgatggtgctgatggtgtggatggagttgatggattaggttggactggtggttcctatgaccctcttaccggcgtcgttactttcacgtctgatgacggcttgggttttgttacaggtgacttaaggggagctgatggtgccgatggtgtagatggtgttgatggtgccgttggacctcagggtccagagggtccacaaggattgcaaggagacactggtccacaaggacctcaaggcctccaaggtgagcaaggacttcaaggacctcagggtctacctggtgccgacggagccgacggagcccaaggaccgcaaggaatccaaggagagcaaggtttacagggtcctcagggtttacctggtgccgatggagctgattctaccgtccctggtcctcaaggccctaagggagacaaaggtgatactggtgacgctggtccacagggacctaaaggcgatactggcgacgctggtccacaaggtttgaagggtgatcctggaaatgatggagctgacggcgctactggacctgaaggacctcaaggtccacaaggaaacccaggcgctgatggcgctgacggagcccagggacctaaaggtgacaagggcgacacaggagatccgggagcacaaggtcctcaaggcaatccaggtgaccagggaccacaaggaaatccaggagcagacggagcggatggagctattggccctgagggtcctcagggtccacaaggaccagagggaccagaa

SEQ ID NO: 2305 - DNA, 933 bp, synthetic construct
  misc_feature 1..933: note = Description of Artificial Sequence: Synthetic polynucleotide
  source 1..933: mol_type = other DNA
ggtccatacggctcctccttgggatactccgccttttatggttctagagtcggtccctttggcacttacggtacgagcggtctgtttggctctggatacggtccgtttggccatttaggaccttacggtagtgctttgggatactctggtctatatggatcaagactgggtccatttggaacctacggtacaagcgctctatacggatctggatatggaccttttggtcatttaggaccatacggcagtaccttgggatactcaggactctacggtagtagattgggaccatttggtacgtatggcacgtccggtgtattcggttcaggttatggtcctttcggacacttaggaccttatagctcaacacttggatattctggtttgtacggatcaagactgggaccattcggtacctacggtacttccgcattgtatggatccggttatggaccattcggacacctaggaccttacggatcaactttgggctatagtggcttgtattcctctcgtttgggcccatttggaacttacggaacaccgggtcttttcggttctggatatggtccatttggtcatttaggtccatatggatctacgttgggttactccggcctatacggtagcggtctaggcccatttggaacatacggcacatccttattcggttctggatacggtcccttcggacaccttggaccatacggtagttccctgggctattcaggactttatggctcaagtttaggtccttttggtccttacggaaccagtggtctttttggatctgtctacggcccttttggtcatttgggtccctatggatcgactctaggatattccggattgtacggttcccgcttaggtcctttcggaacttatggtacttcaagtttatatggttccggatacggcccttttggccctcta

SEQ ID NO: 2306 - DNA, 654 bp, synthetic construct
  misc_feature 1..654: note = Description of Artificial Sequence: Synthetic polynucleotide
  source 1..654: mol_type = other DNA
ggtccatccagtggcgcaagtggacactctggaccatcctccggtgcctcaggccatagtggaccatcctcaggtgcatctggtcacagtggcccaagtagcggtgcttcaggacattctggacctagttctggagcatctggacatagcgttacgtcgtcgcataccggaccttcgagtggtgcctcaggtcactccggtccctcttcaggagcctcgggtcactcaggcccatcttctggtgcttccggacacagtggaccctcatctggtgcatctggccactcagtgacgtcaagtcatacgggtccttctagtggtgcaagtggacatagtggaccatctagcggtgcctcaggacactctggaccttcttcgggagcttccggacattctggcccatcatctggagcgtcaggtcattctggtccttcatcaggagcctccggtcattcgggaccatcctcgggtgcctccggtcattctgtaacctcttctcacacaggtccatcttctggtgcatctggtcattccggaccatcgagcggtgcttctggtcattcaggtccatcgtcaggagctagcggccactctggtccaagcagcggagcttccggtcacagcggcccatcatccggtgcttctggacactca

SEQ ID NO: 2307 - DNA, 825 bp, synthetic construct
  misc_feature 1..825: note = Description of Artificial Sequence: Synthetic polynucleotide
  source 1..825: mol_type = other DNA
ggtataggtggaggccaacctggaattggtgttcaacctggatatggaggacaaactggtggccaaccaggatatagaggacaaactggaacaggaacaggtcaacctggttatggtggtcaaaccggaataggtggaggtgcaacccaaccttcgtacgctcaaactggtggacaacctggttacggtggaggtcagcaggtccaaccaggatatggtggacaaacaggagccggtcagcctggatatggaggtcaaatcggaacaggtcagcctggatacggcggtcaaactggtataggaggtggtcaaccgagtactggtattcagcctggctacggagcccagcccggctacggaggccagaccggaactggaactggccaaccaggttatggaggtcctgcgggcactggtcctggtctaccaggctatggtggacaaactggtactggtgcaggtcaaccaggatttggtggtcagactggagccggtcaacctggttttggaggacagaccggaactggtgtgggccagccaggttacggcggccaagctggaacaggacaaccaggttacggaggtcaaactggaggtcagcctggttatggaggtcagactggcactggcacaggacaaccaggatacggtggccagactggaattggtggtggacagcctggttacggtggtcagacaggaacaggaaccggcaagcctggttatggtgagcagaccggtacaggagcagctcagcctagctacggacaaacagctggccagcctggctatggcggtggccttccaggacaacttgtccaacca

SEQ ID NO: 2308 - DNA, 477 bp, synthetic construct
  misc_feature 1..477: note = Description of Artificial Sequence: Synthetic polynucleotide
  source 1..477: mol_type = other DNA
ggttacactccatctggtaagagttctgagtccagcatgaacacagcttcgtctgagagttcgatgaatacggcgagctcagagagttggataaagactgcctcctccgaatcttctatgaacactgcctcttccgaatcgtctatgaatacagcttcttcagaaagttggatcaatactgcttcatccgaatcttcaatgaacactgctagctctgaatcctggataaacactgccagtagtgagtctagtatgaattcggcgtcgtcagagagttggatcaatacagcttctagtgaatcctggatgaacactgcttcatcagagtcttggattaacactgctagttcagaatcgtccatgaacaccgcgtcatctgagtcctggataaatacagcttcaagtgagagtagtatgtccaccgcttcttccgaatcttggattaatacggcatccagtgagtccagcatgtctaca

SEQ ID NO: 2309 - DNA, 846 bp, synthetic construct
  misc_feature 1..846: note = Description of Artificial Sequence: Synthetic polynucleotide
  source 1..846: mol_type = other DNA
ggtacaacaacgtacagagtttcaggtagttcctcggcttcctccgacgtcccaccagtatatactacaacagtcacatcaggaagctcaaccgagactgacgttgtgagtgaatatagtacaaccgactctaatggaatgcctagtacgggtactactacataccacgttagtggatcttcatccgcgagtagcgacgtacctcctgtatacaccacgaccgtgacatcgggttcctctactgagactgatgtcgtatctgaatactccacgacagacagcaacggtatgccatctaccggtacaacaacttatcacgtgagtggttcatcctctgcttcatctgacgtacctccagtctacactaccactgtaactagtggttctagtactgaaacggacgttgtttctgaatactctacaactgattcgaatggtatgccttccacaggtactacgacatatgaagtaactgacagttgccctgattgttctactggagctccgtcgcatagaagtaatgaggtcagctccatgccgtctagttttgctacctcatccatgagttctatttcccctgccacttccagtggtatgcctccagtctatactaccacagtcacatcgggatcatctactgaaactgatgtggtttctgaatacagtacgactgactccaatggaatgccgtctaccggtaccacaacgtatcacgtttctggctcaagttcagcctccagcgacgtcccaccggtctacacaactaccgtaacgtcaggttcttcaacagaaactgacgttgtatctgagtacagcactactgactcgaacggtatgccttcgaca

SEQ ID NO: 2310 - DNA, 660 bp, synthetic construct
  misc_feature 1..660: note = Description of Artificial Sequence: Synthetic polynucleotide
  source 1..660: mol_type = other DNA
ggtacgtacccaccaggacaggccccccctggcacttatgctccaggacaaggtccacctggaacttaccctccaggacaaggaccacccggcacctatgcgccaggacaaggacctcctggaacttatccacctggccaaggtccaccaggaacgtatgctcctggacaaggtccaccgggcacctatccacctggacaaggacctccaggtacctatcctccaggacagggtcctgctggaacttacccaccaggtcagggtcctccgggcacttacccgccaggtcaagctccacctggaacctacccccctggacaaggtcctccgggtacttatttgcctggccaaggaccaccaggtacatatccacctggtcagggaccgccaggcacttatcagccaggagagggtgctcctggaacctatcagccgggtccaggtgcaccaggtacatacgcacctggtcagggtcctccaggaacttaccctcctgaacagggccctccaggtacttaccctcctggacagggtccggcaggtacttaccccccaggtcagggtccaccgggtacttatccacctggacaggcacctccgggtacctatcctcctggacaaggaccacctggtacttacttgcctggtcaaggtccacca

SEQ ID NO: 2311 - DNA, 813 bp, synthetic construct
  misc_feature 1..813: note = Description of Artificial Sequence: Synthetic polynucleotide
  source 1..813: mol_type = other DNA
ggtctgttgggtggataccctggattaggaggtttgtctagtttatacggaggatacccaggtctgttgggtggactgagcggtttaggtggacctcttggcttaggcagatatcctggattgtcaggactatatggaagatacggaactctgggttccttgagttcactgtatggtggctatcctggttacggtggactttccggtctattgggttcttatgctggtcttggaggcctatctaccctttatggtggttatccgggactgctaggtggtttgtcaggagtcggaggaccattcggtcttggccgttaccctggtctaagcggtctttacggacgatacggtactctgggatctctaagcacactttacggaggatatccaggatacggcggtttgtctggtttgctaggtggttatcctggattaggtggtttaagcggactgtacggcggttaccctggcgtcttaggaggtttaagcggtttaggaggtagattgggtcttttgggacgttaccctggactaagcggcctctatggtggttacggaactttgggaagcttatctactttgtacggtggatatccaggcttaaccggcgtatcctcgttgtacggtggttacagcggtgccctgggtggattgtctggattgggtggtccactaggagtcttaggccattacccaggattgtactcgtcaggtctgggcagccttggattattaggtccttacggttcatctcttggttactcagccctatacggatccagagtaggacctttcggtccatatggcacttca

SEQ ID NO: 2312 - DNA, 819 bp, synthetic construct
  misc_feature 1..819: note = Description of Artificial Sequence: Synthetic polynucleotide
  source 1..819: mol_type = other DNA
ggtttgtttggatcagtctatggacccattggacacttaggaccgtacggatctactcttggatactccggattgtatggatcgtctctaggaccatttggaacatactccacgtccggcctgttcggatcaggttacggtccttttggtcatttaggtccttatggatctaccttaggttattcaggtttatatggttctaggttgggaccgtttggaacatacggcacatcatctctttatggaagtggatatggtccattcggtcaccttggaccctatggttcaactctgggttactcaggcttgtatggaagcagattgggacctttcggcacttatggtacttctggtctttttggaagtggttacggaccatttggccacttgggtccatacggatccactttgggttattcaggagtgtacggttcgagattaggtccttttggaacttatggaacaagcggtttatttggaagtagttacggacctttcggtcatctcggcccatatggctctacgttgggatattcgggcctgtacggatcatctctgggaccgtttggtacatatagcacctctggcttatttggctccggatacggaccatttggtcatttgggaccttatggaagcacactaggatactctggtctatacggttctagactgggaccattcggtacatacggtacatcttcattgtacggttcgggatatggccctttcggacctctgggtccttacggttctaccttgggctattcaggtctatacggatccagtgttggaccattcggaacttacggaacttca

SEQ ID NO: 2313 - DNA, 672 bp, synthetic construct
  misc_feature 1..672: note = Description of Artificial Sequence: Synthetic polynucleotide
  source 1..672: mol_type = other DNA
ggtcagggttctccaggatctggtcagcctggttctggacacccgggcagtggtcaaccgggtagtggctcacctggtagtggacaaccaggatcaggatcccctggttccggacaaccgggtagcggttctcctggaagtggtcaaccaggttcaggcagtccaggttctggtcaacctggttattaccaaccaggatcacaaggccaacctggtaacggtcagcctggatcaggacagcccggctctggacaacctgagagtggacaacctggtaatggccaacctggttcaggccagcctggatcaggtgaacctggatctggtcaacctggatattatcgacctggtggtaagggacaaccaggaaacggacaaccaggatccggtcagcctggtagtggagaaccaggatcgggccaacctggttccggtcaaccaggctattacaggccgggaggtaagggtcagcctggtaatggtcaaccgggttctagtcaaccgggtagcggagaaccaggttcgggacaaccaggatctggtcaaccaggctactatcgtccaggtggcaagggtcaaccaggcaacggacagcctggatctggacaacctggtagcggagaacctggtagctcacagccaggttctggacagcctggatactatagacca

SEQ ID NO: 2314 - DNA, 720 bp, synthetic construct
  misc_feature 1..720: note = Description of Artificial Sequence: Synthetic polynucleotide
  source 1..720: mol_type = other DNA
ggtcaaggtatgaggccaggtcagggcatgggaccatcccaaggtatgggtcctggtcaaggtatgggacctggtcaaggaattggtcctggtcagggaatgggccctggtcaaggagtgggcccaggtcaaggcattggtccaggtcaaagtgtaagacctggccaaggcatgggtcctggacaaggtatgggtccaggccagggcgtaggtccgggtcaagagatgggacctggacaaggaattggtccaggacagggaatgcgccctggtcaaggtgtgggccccggacaaggtatgggccatggacaaggtatggaacctggtcaaggaatgggcccgggtcaaggcctaggtccaggacagggtgttggaccgggtcaaggaataggttccgagcaaggtatgggccctggccaaagcatgggtccaggacaaggaatgggtcctagacaaggaatgggcccaggtaaaggtttcggttctggacaaggtattggtccaggtcagtcaatgggtcccggacagggaatgggaccaggccaagatgttggacccggacagggaatcggttcaggacaaggcataggtccaggtcaaggaatcggtcgtggtcaagttcttggtcctggacaagttattgagccgggacagggtctaggacctggacagggtattggaccaagccagggtatgtcccctggccaactgatgggtcca

SEQ ID NO: 2315 - DNA, 612 bp, synthetic construct
  misc_feature 1..612: note = Description of Artificial Sequence: Synthetic polynucleotide
  source 1..612: mol_type = other DNA
ggtgaaggtgaagaaggtgaagataaggacaacaccggagagggagaggaaggtgaggacaaagacaatactggtgagggtgaagaaggcgaagataaggataatactggagagggtgaagagggagaagataaagacaacaccggtgaaggagaagagggcgaggacaaggacaacaccggagaaggtgaagaaggcgaggataaagataacacaggtgaaggagaagaaggcgaggacaaagacaacactggtgaaggtgaagagggtgaagataaggataatacaggagagggtgaggagggtgaggataaggataacaccggtgagggtgaagaaggtgaggataaggacaacacaggtgaaggagaagagggtgaggacaaagataatacgggagaaggagaggagggagaagataaagataataccggtgaaggagaggaaggcgaggacaaggataacaccggcgagggagaagaaggtgaggacaaggataatacaggcgaaggcgaagaaggagaagataaggacaataccggtgagggtgaggagggtgaagataaagataacactggcgaaggagaagagggagaggacaaggataacaca

SEQ ID NO: 2316 - DNA, 567 bp, synthetic construct
  misc_feature 1..567: note = Description of Artificial Sequence: Synthetic polynucleotide
  source 1..567: mol_type = other DNA
ggtgaaggtgaagaaggtgaggaaggtgaagataaggacaacacgggagagggagaagaaggcgaggagggcgaggataaggataacactggcgaaggtgaggagggtgaagagggagaggacaaggataacacaggcgaaggagaagagggagaggataaagataacactggcgagggtgaggagggtgaggacaaagataacactggtgaaggcgacgaaggtgaagataaagacaataccggagaaggagaagagggtgaagagggtgaagataaggacaataccggcgaaggagaagaaggagaagataaagacaacacaggcgaaggcgaggaaggtgaagaaggtgaagataaagataatactggagagggcgaggagggagaggagggcgaagataaggataacactggagaaggcgaggagggcgaagaaggtgaggacaaagacaatactggagaaggagaggagggagaagataaggacaacactggagaaggagaggaaggagaggataaagacaatactggcgagggcgaagagggagaggataaggataataca

SEQ ID NO: 2317 - DNA, 363 bp, synthetic construct
  misc_feature 1..363: note = Description of Artificial Sequence: Synthetic polynucleotide
  source 1..363: mol_type = other DNA
ggtcaacaaaaaaattctgagcagcaaaaaaacaacgaacaacagaagaactcagagcagcaaaagaacaatgaacagcagaagaattcggagcaacaaaagaactccgagcaacagaagaataatgagcaacagaagaataacgaacagcaaaagaacaacgagcagcagaagaataacgagcaacagaagaacaatgaacaacaaaagaataacgagcagcagaaaaacaatgagcaacaaaaaaataacgaacaacaaaagaactctgagcagcaaaagaataatgaacagcaaaagaacagcgaacagcaaaaaaataatgaacaacagaaaaataatgagcaacaaaagaacaatgaa

SEQ ID NO: 2318 - DNA, 1062 bp, synthetic construct
  misc_feature 1..1062: note = Description of Artificial Sequence: Synthetic polynucleotide
  source 1..1062: mol_type = other DNA
ggtttgccaccaggtagtattcctccattgaggccaccaaatcaaggtggccatccacctggttcccagaagcctccgaacgtcggaatctacccgccatccactggttggatccctccttttggtcctcttacacaaggtggacacccacctggatctttattgcctcctaacacaggactaccaccaggttcgataccacctcttggaagcccgaaccagataggacatcctccaggctctcaaaaacccccaaatgttggtatctacccaccttcaactggatggactccaccatctggtcctttgacgcaaggaggacaccctccaggatctctgttgccacctaacactggattgccacctggatctatcccacctctgggctcccctaatcaaatcggacatcctccaggttcacaaaaaccaccgaacgtaggaatatatcccccatcaaccggttggattccaccttcaggtcctcttacccaatccggtcatccccctggtagtttgcttcctcctaatactggtttgccgccaggctctattcctccattacgtcctccaaatcagggaggacaccctcctggatctcagaagccgcctaacgtaggtatttacccgcctagcactggttggattcctccatccggacctcttacccaaggaggacatccaccaggtagccttttaccacctaataccggtttgccatcaggtagtataccaccattgggatccccaaatcaaattggtcatcctccaggctcgcaaaagccaccaaactcgggaatttatccaccaagtacgggtagtatccctccatcaggtcctcttactcagggtggacatccaccaggaagtctgttgccgcctaatactggccttccttctggcagtattccacctctcggttccccaaatcagattggtcacccgcctggatcacagaagcctccaaattccggtatctatccaccatctaccggttggattcctccttcgggaccattgactcagggcggacatcctcctggaagtctactaccgccaaacaca

SEQ ID NO: 2319 - DNA, 594 bp, synthetic construct
  misc_feature 1..594: note = Description of Artificial Sequence: Synthetic polynucleotide
  source 1..594: mol_type = other DNA
ggtgcccagaagtggtgtgacaagacgtgtaaatgcaaatgcgagaaagaaatgccaactggtggatgtgagaataacaaaaaatggtgtgacgaaacttgtgattgcgtttgtcctcagaagaatacatgtattgctcctaaagtttgggacgccaaaacctgctcatgtatctgtgtaaatcctcctaagtgcaactcaccccaggttcttaaagacacatgttgctgtggttgtcaaaacgttaaaagttgcaaagctcctcaaaaattcatcgagaatatatgcgattgtgcctgtcccaataagaagcagtgcaaggcccctttagtttggtctgacgagttctgtgactgcgtctgcccaaactcggcgtccatgaaaacttgtttgtcgccaaaggaatggaacaaagtcacatgcacttgtgactgtaacccgccgaagccggactgttgtcctggtacacaaaagtggatggacgataagtgcaagtgcggttgccctaacgctcaaaccgattgtgctggaggtaagaaattcaacgactttacttgttcttgtggttgcccttctggtaagcttgactgcaca

SEQ ID NO: 2320 - DNA, 825 bp, synthetic construct
  misc_feature 1..825: note = Description of Artificial Sequence: Synthetic polynucleotide
  source 1..825: mol_type = other DNA
ggtggaggcatgcaccatcagcatcaacagcatcaacaacaacaacaacatggaaagcatcatttgttattgcatcaccatcacacacacgatcaccaaaattctcataacaatggaaaccaccacgattcggaccatgaccacgttcaccatatgcaccatcatcttcagcaacatggtggtggagatgatgattcctcttctagcatgttggtgggttccttgttacaacaccatcaacatcaacaacaacagcatcaacagcagcaacatcaccatcaacaacaacaccatcatcagcaacagcatagtcctgttgatatctacgccgctgccgcagcagctgcacaccacaatcatcagcagcagcaacaacaccagcaacagcaacaacagcatcatagtcatcatcagcaacttcaattgcaacaacacttgaagtcatctgctgccgctgctgcagcagccgcagctgcagcagaatttgcagcttccaaccatcctttctcaataacgagacttcttccgccaccaccgactgcaagcgccgctgctgcagcctccgcttcagataagccttcgtctgccgcctctgtggctgctgccactgcttctagtgctacagctgcttcagctgctgaaaagatgtatgagatggctgccgcttcgcaatacggcactactgctggatataatgattattatcatcctcacgctcaccctcaccatcctcaccaccatggtcatccacatccacaccatcaacaagcatcactgtatcacgccgcagctgccgccgctgccgccgcggccgctgcagctgca

SEQ ID NO: 2321 - DNA, 609 bp, synthetic construct
  misc_feature 1..609: note = Description of Artificial Sequence: Synthetic polynucleotide
  source 1..609: mol_type = other DNA
ggtactacaggaggaggaggtgttacttatcctggaggtgcacccggaacgactacgggcggtggtacttatcctggtggcgttcacggtacaactactggtggtggtggtacttacccaggaggtgttccaggcacaacaacaggtggaggtggcggtacctaccccggtggagtgcctggtacaactacaggaggcggtggaacttaccctggaggtgtccctggcactaccaccggcggtggtggtacctacccaggtggaggcggaacttatcctggaggagtccctggcactgtaacaaccggtggcggaggtacttatcccggtggcgtgcctggtacggtaacaactggaggaggtggaacttacccaggtggagtcccaggaaccaccggaggtggtggtacctatcctggaggcatgccaggtactacaactggtggaggtgttacctatcctggtggtacaccaggtaccaggattgatggtggcgcagtttatccaccaggtattcctggtactacgactggaggaggaggaacgtacccaggaggaatccctggaaccactaccggcggaggtgtgacttatcctggtggagttcca

SEQ ID NO: 2322 - DNA, 516 bp, synthetic construct
  misc_feature 1..516: note = Description of Artificial Sequence: Synthetic polynucleotide
  source 1..516: mol_type = other DNA
ggtggtggtacttaccctggtggtgtcccgggaacaactactggtggaggagttatctatccgggtggtgttccaggtacaacgaccggaggtggcacttatcccggtggagtcccaggaactacgactggtggaggtgttatttacccaggcggcgttcctggcactactaccggaggaggaacttacccaggtggtgtccctggaactacaacaggaggaggagtcatctaccctggaggagttccaggtacaactaccggaggaggtacctaccctggtggagttcctggtacaaccatcaccggtgacgccagagtatacgttggtactattccttcaggtggtgtcgttggaggagaagtctatccaggaaaagttccgggatctggagttgtatatcctggtggagttccagaccgcaccacctccggaggagtcatttatcctggaggtgtgccgggcaccactactggaggtggaacctatcctggaggtgctccaggcactacgaca

SEQ ID NO: 2323 - DNA, 540 bp, synthetic construct
  misc_feature 1..540: note = Description of Artificial Sequence: Synthetic polynucleotide
  source 1..540: mol_type = other DNA
ggtcaaaactcagagcagtctaacgaaggtcagaactccgaacagtctaatgaggttcaatcgtcagagcattctaacgaaggacaaaacagcaaacagtccaacgaaggtcagaattctgaacagtctaatgaagtgcagtcgtctgaacactcaaatgaaggacagaattccgagcaatcaaatgaggttcaatcctctgaacacagtaatgaaggtcaaaattctaaacagtccaacgagggacaaaattccaagcaaagcaatgaagtgcagtccagtgaacattggaatgaaggtcagaattccaagcaatctaacgaggatcagaactctgagcagtcaaatgaaggccagaactctaagcagtctaatgagggtcaaaactctaagcaatcgaatgaagatcaaaactccgaacagagtaacgagggccaaaactctaagcagtccaacgaagttcaaagctctgaacagtcaaatgaaggtcaaaacagcaaacaatctaatgagggccagagttctgagcaatctaatgaa

SEQ ID NO: 2324 - DNA, 720 bp, synthetic construct
  misc_feature 1..720: note = Description of Artificial Sequence: Synthetic polynucleotide
  source 1..720: mol_type = other DNA
ggttatggaagcactcaaactgctcgtgaaggatcaaatttgacggctggatacggttccactggtacggcaggatctgactcatccctcattgcaggatacggatcaactcagacctctggagaggactcctcattaactgcgggctacggaagtacacagactgcacaagagggctcaaatctgacagcaggatatggtagcaccggcacggcaggttcagattcttctttaatcgcaggctacggttctactcaaacttctggtggagattcttccctaacagctggttacggaagcactcaaacagcgcaagagggaagtaacttaactgcaggttacggaagtactggtaccgcaggatctgatagctcactcattgctggatacggaagtacccaaacaagcggtgaggattcatctttaaccgccggatacggttcgacgcaaaccgctcaggagggttccaacttaacagcaggttatggttcaacaggaaccgcgggatctgactcgtcattaatcgccggttatggatccactcagacgtctggtggtgactcttctctcaccgcaggttacggctcgactcagactgcccaagaaggttctaatttaactagtggatatggttcgacaggtaccgccggtgccgactctagtttgattgctggatatggttccactcaaacgtccggttctgattctgctcttacagca

SEQ ID NO: 2325 - DNA, 612 bp, synthetic construct
  misc_feature 1..612: note = Description of Artificial Sequence: Synthetic polynucleotide
  source 1..612: mol_type = other DNA
ggtagtggacgaatggctgactccggaggaatggccggtagtggcagaatggcagactccggtcgtatggccggttcaggacacatggcaggcagtggacatatggcaggcagtggccacatggcaggatcaggtagaatggctggatccggaagaatggccgactctggtggaatggctggttcttggagaatggccggttctggtagaatggccggatcaggaagaatggcaggaagcggtcgaatggctggttcctggcgtatggccggatccggtcgaatggcaggttccggaagaatggctggatctggtcatatggccggttctggtgatatggcaggttccggatgcatggccggttcgggaaggatggcaggttcaggtcatatggcaggctcaggaaggatggtcggatcgggacatatggttggatctggcagaatggcaggttccggtggcatggctggttcgggtagaatggctggttcatggcgtatggcaggttctggaagaatggctggaagcggacgcatggctggctccggtcacatggccggatcaggagatatggctggaagtggttgtatggctggatcgggaagaatggca

SEQ ID NO: 2326 - DNA, 648 bp, synthetic construct
  misc_feature 1..648: note = Description of Artificial Sequence: Synthetic polynucleotide
  source 1..648: mol_type = other DNA
ggtgtcccaccatctgccggtgttccaccatccgcaggagtaccaccatctgcggacgtacctccttcagctggtgttagtccaagcgctggtatcccaccttcagccggagcacccccaagtgctggtgttctaccgtccgcgggagttccgccgagcgccggagcacctctgtctgctggtgtgctgccaagtgctggtgtgccaccttctgctggtgtccctccatccgcaggagcaccaccttccgccggtgtacctccttccgccggtgtttctccttccgctggaattccacctagcgcaggagccccaccttcggctggagttctaccttcggcaggagttcctttatcagctggtgttccaccaagcgctggtattccaccttcagctggagccccaccatccgctggtgtgcctcctagcgctggagctccaccttccgctggtgttccgccgtcagcaggagtgcctccatcggcatctgtaccaccgtcagcggatgtacctccctctgcaggagtgtccccatccgcaggaataccaccatcagctggaatccctccctctgccggaattccccctagtgctggagctccaccgagtgccggtgcacctccttctgccggcgttccgccatcggca

SEQ ID NO: 2327 - DNA, 885 bp, synthetic construct
  misc_feature 1..885: note = Description of Artificial Sequence: Synthetic polynucleotide
  source 1..885: mol_type = other DNA
ggtgaggtctataactctgccaagaaaacatgctcatgcccagatggtcagtattggaacggtaaacaatgtgtttgtccatatggtcaagttttcaatggaaagcaatgtgttcctgattgtggcaaagaggcaactttcgattacaatcaaaagaaatgcgtctgcaagaataagggtgagatttacgatagtaagacaaaaacttgctcttgtcctgatggacaagtctggaatggcaaacaatgcgtatgtccgtatggacaagttttcaacggtaagcaatgtgtcccggattgtggcaaagacgccacatatgattataatcagaaaaagtgtgtctgcaaaaacaaaggagaagttttcgaccaaaaaactaagacttgctcctgtccagacggtcagtattggaatggtaagcagtgcgcatgtccgtacggacaaatttttaacggaaaacaatgcgttccagactgtggtaaagacgccacctatgattacaaccaaaaaaaatgcgtatgtaagaacaagggtgaggttttcgaccaaaagactaaaacttgtagttgccctgacggacaatattggaacggaaaacaatgtgtttgcccatatggcaaaattttcgacggtaaacagtgtgttgaagattgcggtaaagacgcacactttgacaacaaccaaaagaagtgcgtctgcaataaaaacggtgaaatatacgattcaaaatctaagacctgttcctgcccagattcccaatactgggacggttccaagtgcgcctgcccttatggtactgtctgggatggtaagcattgtaaccaggattgcggaaaggatgctcatttcgattccaaccagaagaagtgtgtttgcaacaaacaa

SEQ ID NO: 2328 - DNA, 720 bp, synthetic construct
  misc_feature 1..720: note = Description of Artificial Sequence: Synthetic polynucleotide
  source 1..720: mol_type = other DNA
ggtttatggctatgtaaagcaaatactagattgagacgtcagaacggtcattgtcctccaggattgtggctgtgtaaggcaaatactcgactccgcagacagaacggacattgcccgcctggattatggctgtgtaaagctaatactaggcttagacgtcaaaatggtcattgtccaccaggcttgtggttatgcaaggctaacactcgtttgaggcgtcaaaacggacattgtccaccgggattgtggctttgcaaggctaatacaagacttagacgacaaaatggacattgcccacctggattgtggctgtgcaaggctaacaccaggctaagacgacaaaacggacactgtccaccaggtctttggctttgtaaggccaataccagattgagacgccaaaacggccactgtcctcctggcctctggttgtgcaaggccaatactcgtttaagaaggcaaaatggtcactgccctccaggtctgtggctgtgcaaagctaacactagactgcgtcgtcaaaacggtcattgtccacctggtttatggttatgtaaggccaacacaagattgagaaggcagaatggtcactgtccacctggcttgtggctatgtaaggctaatactagactaagacgtcaaaacggtcactgtcctccaggcctttggttatgtaaggctaacactaggttaaggcgacagaatggtcattgtcctcca

SEQ ID NO: 2329 - DNA, 630 bp, synthetic construct
  misc_feature 1..630: note = Description of Artificial Sequence: Synthetic polynucleotide
  source 1..630: mol_type = other DNA
ggtccatggagatcggttggtggtagtttgggcccatggaggtctgttgaaggatccctaggaccatggagatctgttggaggatcgctgtccccatggagatcagctgaaggttcattgggaccttggcgatctgttggtggttcattgggtccgtggcgatcggttggcggaagccttggcccgtggcgatctgttgaaggttcactcggaccatggcgaagcgttggtggaagccttagtccatggagatctgccgagggttccttaggaccatggcgatccgtcggtggttcccttggaccatggagatcagtaggaggaagtttgggtccatggcgttctgtcggaggctcattgggaccatggagatcggcagagggttcgctcggtccatggagatcagttggaggtagtctgggcccatggagatccgtaggaggatccttgggtccttggaggtctgtgggaggtagcctaggtccctggagatctgtagagggatccttaggaccttggcgttcggtcggtggatccttgggaccttggaggagcgttggtggatctctcggaccatggaggtctgctgagggatccctcggaccttggcgtagtgtcggtggttctcta

SEQ ID NO: 2330 - DNA, 576 bp, synthetic construct
  misc_feature 1..576: note = Description of Artificial Sequence: Synthetic polynucleotide
  source 1..576: mol_type = other DNA
ggtgaagaaagcgataacggagaagagtccgacaacgaggaggcttccgacaacggagaagcttcagataacggtgaagagtcagataatgaggaggcttcggacaacggtgaagagagtgacaacggtgaagagcgtggcaatggcgaagcttctgataatggagacgaatccgataatggagaggcgtctgacaatggagaagagtcagataacgaagaagcctctgataacggagaggaaagtgataacggtgaggaatctgataacggagaagaaagaggtaatggtgaagctagtgacaacggagatgaatccgataatggtgaagcttccgataatggtgaggaaagtgacaatgaagaggcctctgacaatggtgaagaatctgacaacggtgaagcatcagacaatggtgaggaatcagacaacgaagaggcttctgacaatggcgaagaatctgataatggtgaggcttcggataacggagaggagtctgacaacggcgaggaaagagataatggagaagcatcggataacggtgaagaatctgagaacggtgaagagattggtcta

SEQ ID NO: 2331 - DNA, 495 bp, synthetic construct
  misc_feature 1..495: note = Description of Artificial Sequence: Synthetic polynucleotide
  source 1..495: mol_type = other DNA
ggtccattgagtgtggacccacaatctgtaggtcctctgtctgttggttcacaaagtgtaggaccacaaagtgttgatcctcagtccgttggtccgctaagtgtggatcctcaatctgttggtccattatctgtagaccctcagtctgtagatccacagtccgtcggaccactgtcggtcgaccctcaatctgtgggaccactatccgtagacccacagtctgtaggccctctttcagtcggacctcttagtgttgacccacagtcagtaggtccacagtcagttggtcctcaaagcgttggacctttaagtgtagatccgcagtctgttggaccgcaaagtgtcgatccacagtctgtaggtcccttgtctgtagacccgcagagcgtgggtccgttgtcagtgggtccactgagtgtggatcctcagtcagtcggccctcagtctgttggacctcaatccgttggaccattgtcggttgatccacaatctgta

SEQ ID NO: 2332 - DNA, 768 bp, synthetic construct
  misc_feature 1..768: note = Description of Artificial Sequence: Synthetic polynucleotide
  source 1..768: mol_type = other DNA
ggtagccctcaggctcaagagggcgccccaggtaggtcgtcagctcagggttctacgcaggcccgtgaaggtgcaccaggaagatcgtccgcaagaggatcacctcaggctcaagaaggcgctcctggtcgaagctctgctcaaggttcaactcaggccagagagggagcaccaggtaggagttccgctagaggctcacctcaagctcaagagggtgcccctggtcgatcgagtgcccagggtagcactcaagccagagaaggagcaccaggtagaagctctgcacgaggatccccacaagcccaggagggtgcacctggtagatcttcagctcaaggaagcactcaagcaagagaaggcgccccaggtagatcatcggccaggggttccccacaggcacaggagggtgctcctggtcgttcttctgcacaaggatcaacccaggctagggaaggtgcacctggaaggagtagtgctcgtggtagtcctcaagctcaggaaggtgctccgggtagatcctccgcacagggttcgacccaagcacgtgaaggtgcacctggtcgttccagtgctaggggaagtccacaggcgcaagaaggagctcctggcagatctagtgcccaaggttctactcaagctagagagggtgcaccaggtcgttcttctgctaggggttcaccacaagctcaggagggagcaccaggcagatcatcggcccaaggatcaacacaggcacgagagggagctcctggaagatcttctgccaga

SEQ ID NO: 2333 - DNA, 606 bp, synthetic construct
  misc_feature 1..606: note = Description of Artificial Sequence: Synthetic polynucleotide
  source 1..606: mol_type = other DNA
ggtggaggtggtccaggaacacaatttccgggtggcgttgtatatcaacctggtacccaagttggcggtggtggtcctggaacgcaaccttccggaggagttttatatccgccaggaacgcaggttggaggtggtggtcctggtacacagttcccagatggtgtagtttaccaacccggaacccaagttggaggcggcggtcctggtgcccaactgccaggagccgtcctctatcctccaggaacccaagttataggaggcggaggacccggaacacaaacaccaggtggtgttgtctaccaaccaggaatccaagctggcggtggaggccctggtgcacaagcccctggaattgtctaccagcctggtacgcaagtcggcggcggacctggcgctcctggcggtattgtttatcaaccaggaaccaaaactgtgggaggcggtcctggtgctcaagctccaggtgtcgtctatcaacctggaacacaggttggtggtggccctggtgcacctggtggaattgtttaccaaccaggaactcagactggtggaggtggaccaggcgctcaagccccaggtttgatttatcaacctggaactcaggca

SEQ ID NO: 2334 - DNA, 855 bp, synthetic construct
  misc_feature 1..855: note = Description of Artificial Sequence: Synthetic polynucleotide
  source 1..855: mol_type = other DNA
ggtatgaacaggttcatgaacagatataggcctatgtttaacaatatgtattcgaacatgtacagaggtcgttatagaggaatgatggaacctatgtcgagaatgacaatggatttccaaggtcgctatatggattcacaaggacgtatggtggatccaagatattatgactattatggacgtttcaatgactatgacagatattatggaaggtcaatgtttaactacggatggatgatggacggagacagatacaatcgttacaacagatggatggattacccggaacgttacatggatatgtctggataccaaatggacatgtcgggtagatggatggatatgcaaggccgacattgcaacccttactctcagtggatgatgtataactacaaccgtcacggttattatccaaattattcctatggtagacacatgttctaccctgagaggtggatggatatgtcaaattacagcatggacatgtacggaagatatatggacaggtggggaagatattgtaaccctttcagtcagtacatgaactattacggtagatactggaattaccctggatacaacaactactactactcccgaaatatgtattacccagaaagatacttcgatatgtctaactggcaaatggacatgcaaggaaggtggatggacaaccaaggtagatactgtagtccatactggaataattggtatggtagacatatgtactatccttaccagaataactacttctatggccgatatgactaccctggaatggactacagtaactaccagatggatatgcagggccgatacatggaccaatacggaatgaacgattattattactca

SEQ ID NO: 2335 - DNA, 1401 bp, synthetic construct
  misc_feature 1..1401: note = Description of Artificial Sequence: Synthetic polynucleotide
  source 1..1401: mol_type = other DNA
gaagacttaaggtttgcagccctccgccggatatcagcctggagcaggttatcagccgggaactggcttgcaaccgggagctggataccaacctggagctggacttcaaccgggtgcaggagtacaaccaggagctggagttcagccaggagccggacttccaccatcagctggattgcagcctggcgcaggtctacagccgggagccggcttacagcctggaacgggataccaaccaggtgctggttatcaacctggagccggcttgcagcctggagccggacttcagcctggagctggactccaacctggcgctggattacaacctggtgcaggataccaccctggagcaggtttgcaacctggtatcggaccacaaccaggagccggcttgcagtccggagcaggactacaaccaggtagcggtttgcaaccaggagctggttatcaaccaggacccggtctgcagccaggtgcaggatatcagccttctgctggtatccgtccagacatgggactccaaccaggtgctggatacaagccaggttcaggctatcaacctggaagttcgtaccaacctggtgctggattgcatccaggtattcagcagggaactggactacatccaggtacaggtttgcaacctagagtaggcttacagccaggcgctggtgtgcaacccggtgctgaataccagcctggttccggttatcaacctgatgctagtttgcatcctggtgctggtctacaacctggaggaagattgcaaccatctgccggtctacagcctggtactggattgcaaccaggagtcggagtacaaccaggtgcagaatatcagccaggatccggatatcaaccaggagctggcttgcagccaggagcaggtttattgcctggtggtagattacagccgggtgcaggacttcaacctggtacaggtttacagccaggtgctggatatcaaccaggttctatctaccaacctggtgcaggatatcaacctggtgccggactccaaccgggagctggtgtgcaaccaggaaccggttatagaccaggagcaggattacagcctggtggacgcttgcaaccatctgctggattgcagccaggtgccggacttcagccaggtgcgggtgttcagccaggcgctgaataccagccgggatctggataccaacctggtgcgggactacagccaggaactggaatccagcccggtgcaggtctgcaacctggtgtaggccttcaacctggtgccggtttacaaccaggagctgtcctccaacctggaacaggatatcagccaggagcaggctatcagccaggtactggattgcaggctggagctggattgcaacctggagctggtttgcaaccaggatcaggtacgtcttc

SEQ ID NO: 2336 - DNA, 1107 bp, synthetic construct
  misc_feature 1..1107: note = Description of Artificial Sequence: Synthetic polynucleotide
  source 1..1107: mol_type = other DNA
gaagacttaaggttcacctttagaggagaagtacgacgagaagtccgaagctgatgactaccaatcagaagattcatctgctgccattcacgaccagacaaccaaaatcgccactaatgccgtgaaaacttacgctaataaggccaaggctaccgagtcaaaggctaagttgtatcatcaatactctaaggatcgtgcctattatagcagagaatacgagaagatgggagaagaatatatgaagaagtccaaggagtatgaacagctttatatagccgaggctgctaggatcagcttgcacgagaataaacaaaaagagtgggacacgaaaggtagagaggcaaatgttggaataagagagtacgaaactaagtcccaacaggcttcttcgaagaaaaatgagctattggaagagagcattatcgctgctgttcaggctgcaatccatgaaacgcaggcaacaggatatctgctaaaatcagaggctgcaaacggtattgctaggaacatgttgcaaattgcagagtctattagggacgaggcctctaatcactaccaaattggtaaagaagagttgaatagagcaaccgctcagaaggtaaaagctcaacaacaggccgaggattctcagcgccaccatgctgctgcgagagcttatcaacaggactctctaagatctagaatggcctccagagccaataatatgcagtatatgcagaattcattattggcagaaagagcacactcgctttctacggagaacactttggaatcagaattgtatggaaaggaggctgacgaattggctaaaatgtcggaagagtccgccgctatctcgaaaatttgttcaggagaggaaagatcctacagaaacatggctaagcagtcagaagtgaaagcttacgaatattccgtatcgaagaatatgatgggtgcagatatgaccgataccgctgcaatggctaatggcgacgaagctaagcaaggtgacgacgaggagcagcaaatgtataggtcacctaacatccctgccgaggatagtaccaagaacctttcctataacttaaaggattctactgagggtgaaggtatgtcaggtacgtcttc

SEQ ID NO: 2337 - DNA, 1074 bp, synthetic construct
  misc_feature 1..1074: note = Description of Artificial Sequence: Synthetic polynucleotide
  source 1..1074: mol_type = other DNA
gaagacttaaggtaaaaaacatgaagccttaaccttcggttctggctacaagtcaacttacggcgaaggtgaaacattcgacgacgaggatgaccaagctttacgtaatgagagagtgccagtaggagctttatctgcagctatcataaacccttacgctctacacagtgaagaaggaagaatagcttacgatacgtcgagccaatactacgcaaataaggccgagggttcggcagacctttcccgcgaaaaaaagcagatgcatggtgaatatcatggtaaagctgccacatacgcgtccagggcgaacgaggcttataagaagtcccagttgcataagcgtcaagccaaagacaaacaggctattgccaaggagtatgaggagcgggctcagaaacatgaatcgaggtcaaaggctctcgatgtacgtgaccaagatgacgagcgtaaatcagtcactgaaatggaggaatacgctagagctctaaagatcgctaatcttgcccttgtctttgctggtatttaccaggagactggtcgattacaattggaggccaccaatgtttttgagcagtttcataaaatgctgtccacaaaaggcgaagagtataaaaaacaagcagaggaatacaaggaaaaggccaataaggagaaggaggaagctgccatccagcaagcaaaaagtaaagaattgaatgctaaagcacaagaatatgaaaatatttttatagagtcctctaagaagctggctgctaatcgttattacgagcttgaattcaaaatgaaagccgagaacgaaaggcatcacgctgaattggcacgtattagatctaggtttttgagtaggctagcaaactataatagagagcaagcagaagctgtcctcagatttgctcgatcagaaagaaaagacggagaaatttttaggcgcaatgcaatcgaactctataaagagactagagccctagctgctacagccgcaagagttatgaagcaacaccgttatacgggtcaagaaatatacacgaaacaaccttttcctcattctaactatcacggagcaggtacgtcttc

SEQ ID NO: 2338 - DNA, 1113 bp, synthetic construct
  misc_feature 1..1113: note = Description of Artificial Sequence: Synthetic polynucleotide
  source 1..1113: mol_type = other DNA
gaagacttaaggttcacctctggaggaaaaatatggtgagaaatatggagatatggaggagtatcagagaggtacggaagattcaagagccgttattaacgaccatactgccaaggtggcctcccaatctgcacgaggaatggttaacaaggctaaaaccacagaagccgctgctagatctaacgagcaactttctaaagatcgtcagtactactaccgtgagtatttgaagaaagccgattaccataagaaaaaggctttggagtacgaacaattgtcagcagccgaaaacgccaaaatcgcctaccacgagagtaagcagaaagattgggagacaaaagccagagagtctgatgtccagtgtagagatgctgaagccaagtatgaacaaagttatactagatctcgtgaattgaagagagagtctattatagcgtatgttcaagcagctatgcatcatgccgaggcgtctggtgaccatatgaaagcggacagagctaaggacattgccagagatatgatgaggaaagccgagtccttaaggggtgatgctagtaaccattaccagagaagcgaggaggataagaacaaggcaaggtctgagaaggtcaaagctcaccaaaacgcagataattcccaacgccaccacactgcttgtagggcctatgaccaggagggattgaaaactcgtctttcctctaaggctaacatgatgagacaaatccattcatctttactcgcggaacgaagccactctttggctagagaggacggtctagccgctgatttgtcacacaaactagccgaagagcttgctagaatgtctgaggagtctggtgcgatttcaaaaattaattcgggagaagaaagaggttattccaataaggtgaggcaagatgaagttaaagcacacgaactcgctgttagcaagagaatgatgggtgcagaggtggccgataattctgagatgatttccctggcacaagcaaaagatggttccttggatgagggtgagaattataagctctctactttctatgcagacgatagcaccaaaaacatgttgcccgattcaaggggacaaatgagctatggtgatgaaggtacgtcttc

SEQ ID NO: 2339 - DNA, 1065 bp, synthetic construct
  misc_feature 1..1065: note = Description of Artificial Sequence: Synthetic polynucleotide
  source 1..1065: mol_type = other DNA
gaagacttaaggtaagaaccatgaagtcatgacctatggctccggatataaaactatgggtgatgagggaggatcgggtgttggcaacgaaggtgaggactatcaagacaacgaaggagccactgcagctactattttggacgagtctacccatcataccgaagaggctcgcgacattttcggtacacgttcagaagcccatgcctacagtgcggagatgtttgctgacttagttagagaaaagagacaagctagtatcgaaagccacaagaaggcggaggactacgccgtcagagctaatgaagagtccaagaagagtcaacttttaaagagacaggcgagagataagcaagccatagctaagcagtatgaagagaaggctcagaagtacgacagaatcagtaagcaacaagacattaaagaacaggatgattacagaaagtccgacgccgagagtgaggagtataagcgttccattgctgtcgctaacgctgctctggctctagcgtccgcttacgaagaggcatctcgtatggagcttgacgccactggtgagatggaacaacaatccaaggagctttataccaaaagtgaagaatataataaggttgcggaagaatgcattacccgtgccaaaaaagaaaaagaactagcgagaatagaagaagcaaagggtaaagaagcagaggctaaaagtcaagaatacgaaaacttcgcgactgacaacaacaagaaatataacgcaatgaagttttatggttgggagttcaagatgaaagctgagaacgaaaggcacaacgctgattactgtagaattaaaagtagatacttggcccagttatccaattataacagagagcaggccgaggcgctttaccacttcgctgctgcccagagaaaggatgccgaattgtttcatcgatacgctatggagttgtataaacagaccagagtgcttactgctagcgctgcccaaattatgaagcaacatcgttacactggccaagaaatctactctaagcagcctttccctcattcgaactaccacggagcaggtacgtcttc

SEQ ID NO: 2340 - DNA, 1119 bp, synthetic construct
  misc_feature 1..1119: note = Description of Artificial Sequence: Synthetic polynucleotide
  source 1..1119: mol_type = other DNA
gaagacttaaggttcgcctctagaggacaaatatgatcagaaatatgaagttgaagattacagaggtggtagcgaagataccaaagctgctatcaacgataatgcagccagagtcgcttcacattccgctaagtcacacgtcaataaggccttagtggtagaagctgctgctagactaaatgctcagattgccaaggaccgtaactactatgctagagagtacacaaagttggccgaagagtctaagaagagagccagacaatatggtcagctggccgacatggaggcaggtaggattggacaacacgaacatatgcagcaagaatggaattcgaaggcaagagagtccgaagctcaatgcaaagcgaccgaagccaaagctcaggaggaatacaccaaagccagagatgagcgtcagaaatcgttggtttctaacgctgaggctgccatgcatgatgctcaagccactgttgacactatgaagtccgaaagggcttatgagattggaaaagagttaatgcgcaaagctgagaacgctagaaacgatgcttccaaccactatcagcgagctaaggagaatagagaaagagctaatagtgaaaccgttaaatcacaccaacaagctcaagacgcccagagacacaacgccgcttccaaggcctaccagcaagatggcctccgaacaagaatggcctctagaattaacattatgaagtacattcagtccagcttgttggctgaaagggctgccaaccaagctagaatagagcaactcaagtctgaatggtacgagaaggcagctaacgagtactccaggatgtctgaagaaaatgccgctatttccaaacttgcaggttctgaggaacactacttcgctcaaagagcgaaaagaaacgagggcaaggcttatgaattgtctcagtcaaagagaatgatgggttccgaggctgccgctgccggagaactgctggctatgtcacaggccaaggatgacgagactgaagatgagaagcatttcgactttccaatttacgagtctgacgatccaactaaactgtcgccatctccggacgaaaaagatttgacatacggttctggtgagggcctaggtacgtcttc

SEQ ID NO: 2341 - DNA, 1047 bp, synthetic construct
  misc_feature 1..1047: note = Description of Artificial Sequence: Synthetic polynucleotide
  source 1..1047: mol_type = other DNA
gaagacttaaggtaagaagcacgaagtcatgacttacggttcaggatataaacacatgggtggagaaacttatgaggacgttggaactggaaacagactaggctctactgctttcgacatcatggaagccgctgacgaaaacaccgagcgagcgtcccatactttcggttcaaaatctgccgcatactcgtccgacgctgacttatttattgagctcctccgggaaaagcgtgagacgagagcaaaccatggtaaacgtgctgaatcacaggcagttttagctaacgagtcgtaccagaagtcccaattgcataaaagacaggccaaagataaacaagccatttctaaagagtatgaggagagagctcaaaaacacgatagactttctaaggagcaggacatgaaggaacatgatgactatagaaagtctaatgcagaggacactgaattgaggaatagtgttgaacgttcaaactatgaccatgtgatggctttaggttatcacgaacttagtcaactcgaaatgggtgaaactaatcaatgtgaacaattgtccagagagctacaatccagagctgaagagtatttcaacctggccaaagaattgaaagagaaagccaagaaggaaaaggaaaatgcccgaattaaaaaggcaaaagccaaggaagaagaagccagagcagaagaatacgaaaatgcctttactgaaaatagcaagaaggtattagcatacaagttttatgagctggagttcggtatgaaggctctaaatgaacatcatcaggctgaatcagcacgtgtccgccatcactttttacagattttagagcaacacaatagtcaacatgcagacatgctttggggatacgcacaacaggaagataaagacggtagatcttttactcagtacgcgaccgagctctcaaagcagaccaaaatgctcaccgctaccgctgctcacctgatgaaacaacaccgctatacgggtatggagatgtattcgaagcaaccgttccctcactctaactaccatggaggtacgtcttc

SEQ ID NO: 2342 - DNA, 771 bp, synthetic construct
  misc_feature 1..771: note = Description of Artificial Sequence: Synthetic polynucleotide
  source 1..771: mol_type = other DNA
gaagacttaaggtcctagaggttggtatggccctagaggattgggcccccgcggtctgggaccattaggattggattcagacatcattggagatggttacggtccgtatggtttgggatctcgtggattgggaccattgggacttgattctgacataatcggtgacggctacggaccaagaggattaggtccacacggattgggccctagaggtctaggtccactaggtttggattcagatataataggtgatggatacggaccttacggattgggtcctaggggtctgggtccattgggaggtttgggaaggcgaccttacggtggatactctgcatctggttctgtatctgccgaaggcccacgtggatggtatggcccacgaggcttgggtggaattggtggttggagatccagaccatatggaggttactcggctagccactctgtcagtgttgaggccccagttgtataccatgcacctatcataaggagagctcccaaaatttctagatcatcctcctactccgtggaaagaatagttacaccaactgttatcaccagaatctctggttctcattccgtatccgcagagggtagaagaggtgtttggggtccacatggagtctggggacctagtggcctttacggcgattcaggtatagtcgacggagtctacggacctggtttggttggccctggaggctggggaagaaggccatatggaggatactccgcttctagatctgtcagtgctgaaggtacgtcttc

SEQ ID NO: 2343 - DNA, 861 bp, synthetic construct
  misc_feature 1..861: note = Description of Artificial Sequence: Synthetic polynucleotide
  source 1..861: mol_type = other DNA
gaagacttaaggtccaagaggctggtatggaccacgcggtctaggaccaagaggattgggacctttgggattagattctgacataattggtgatggatatggaccttacggactcggctcacgtggcctcggccccttaggtctggacagtgacataatcggtgatggatacggtccaagaggtctgggaccgagaggactaggaccacttggccttgactccgacataataggagacggttatggaccctacggcttgggtccacgcggattgggtccactcggaggtttgggaaggaggccctatggaggttacagcgcatctggtagtgtttctgcggagggaccacgcggatggtacggcccgagaggcttgggtggtattggcggatggcgttcgaggccatacggtggatactcagcctcccattcggtgtctgttgaggctcctgttgtctaccacgcaccaataattcgtagggctccaaaaatttctagatcagcttcttatagtgtcgaaagaattgttagacctaccgtaattactaagatccataagtctgtttcgcattctgtggaacaacctatttactatcgaccaccagttgttgttcgcgctccaaaagtcagcaagtctgaatcctattccgttgaacgtattgtaactccgacagtgattactcgaatacatcactccgcatctgattctgtagaacagcctatttattacagacctcctgttgttgttcgacgtccaaagatttctagatctgcttcttattcagtagaaagaatcgttaccccaacagtgattactaggattagcggctctcactcagtctccgctgaaggtacgtcttc

SEQ ID NO: 2344 - DNA, 405 bp, synthetic construct
  misc_feature 1..405: note = Description of Artificial Sequence: Synthetic polynucleotide
  source 1..405: mol_type = other DNA
gaagacttaaggtaagattggccataacgcccagaaaggtatcgatgacttcttgggtggcgcccacatctcgaaatgtggcaaacatgagcgaattttacaaggagaggatattattgaaactaacgctaaaggagaactgatcgagaagattgtgtcacgtaaggagattcttacagacgatgatagcgaatccttctctgtttcctacagtagtgaggacgattctacagaaactatagttaagactattacaatcgtgcaagagattcctaagcatggaaaaggtaagggtcatgctaaggaaaaaattttcgaagaagaaacggttatcaaaaaaatcggaaagggtgtcgccgcacctgtagttgctcctgctgttgacatagttggaggtacgtcttc

SEQ ID NO: 2345 - DNA, 621 bp, synthetic construct
  misc_feature 1..621: note = Description of Artificial Sequence: Synthetic polynucleotide
  source 1..621: mol_type = other DNA
gaagacttaaggtagacgcggtgtctatggtccacgtggcgtctggggaccatcgggtttatacggcgattctggaatcctcgatggcgtatatggtcctggtttagtaggaccaggaggatggggacgtagaccatacggtggttactccgcttcttcatctgtgtcggcggaaggcccaaggggatggtacggtcctagaggactgggtcctagacgtatcggcctgggaggctactcagcctctggttctgtaagcgctgagggaccaagaggatggtatggaccaaggggcctaggacctcgtagaataggttctttaggtggatactcagcgagtggttctgtttctgctgaaggtatcagaggcgtacttcgtccgtcccctggtattgtggtgcctggtgttatatcctccggtgtggttgctcctggcttagttggcggacatggaggattagtgaacgtcggtggaacccacgtcttgccaggtacatctgtctatactacacatccagatcctagaacggttagatcttcctgtagaacctccccctacaacctattgattaaagttggtaacgctagaaagctgaatggcaattgttcaggtacgtcttc

SEQ ID NO: 2346 - DNA, 792 bp, synthetic construct
  misc_feature 1..792: note = Description of Artificial Sequence: Synthetic polynucleotide
  source 1..792: mol_type = other DNA
gaagacttaaggtaacagatactacgacctatggaacacatgctgtcaaagaccaagatacgacggatgcggtatttttggaaaccatctatgggattacgttaagtactcagcctcatggtcacattccgtagaaaactatgatgttggttaccatggattttactgggatgattcgtgggtgcatggcgtgcctcatggtaactactactacccgctttggaattactgctgtcaacatccaagatgtaataggtgcggaatttttggccatcacttgcaggactatgttaagtactccgcatcatggtccacctctgttgagaactacggttacgatgtcagttatccgggtttctactgggataactcttgggtgcatggtgtgccacatggaaatcactattaccctctatggaactactgttgccaacatccaagatgcaatagatgcggaatcttcggacaccatctacaggattatattaaatactctgcttcttggagtacttcggttgagaattatggttacgatgtcggctacccaggattttactgggacgactcctgggttcatggtgtcccacatggaaatcattactatcctctctggaactattgctgtcatcatcctaggtgcaaccggtgtggtatttttggccatcatttgcaagactatgtgaagtattcggcttcttggtctacgtccgtcgaggactacggtggatacgattacgacttctactgggacgactcttgggtacatggcgttccacatctaggtacgtcttc

SEQ ID NO: 2347 - DNA, 837 bp, synthetic construct
  misc_feature 1..837: note = Description of Artificial Sequence: Synthetic polynucleotide
  source 1..837: mol_type = other DNA
gaagacttaaggtcgaggtctgggcagaggtaaacacggctggggaggacttggacacggaggactaggaggtttgggtcatggaggactgggtggtctaggtcacggtggcttgggaggactgggtcatggcggtttgggtggcttgggttccgactctggcgacttaggcggaataggcggtctgctgggaccaggtggtcgtagaggttggggtcgtcgaggcccgggtaagtattctgcttcggtgagtatttctcattctatttctatcgaacgagtaattacacctggcgtttacacttctatacatagatcggtttctgtttcgcactcagtctcggtagaacatagaaggagaatagctccaattgtcgtggactattccatttcgtctagtcttagtatctcaggcgaaggaagaggacttggaagaggtaagcacggctggggtggcctcggccacggtggactaggtggcttgggtcatggtggcctaggaggtctgggacacggaggtttgggaggtttaggacacggtggacttggtggccttggaagcgattctggtgatttaggaggtattggtggccttctgggcccaggaggaagaagaggttggggcaggagaggtccaggaaagtacagcgcttccgtttccatttcccactctattagtattgaacgagtaatcacgcccggagtttacacttcaatacatagatctgtgtcggtttcacattctgtctctgttgagcatcgtaggagaatcgctcctattgtagttgactactctatctcctcctcattgtccatttccggagaaggtacgtcttc

SEQ ID NO: 2348 - DNA, 837 bp, synthetic construct
  misc_feature 1..837: note = Description of Artificial Sequence: Synthetic polynucleotide
  source 1..837: mol_type = other DNA
gaagacttaaggtaggggacttggtagaggcaagcacggttggggtggcctgggacatggtggtttgggtggtcttggacatggaggtttaggaggcttgggtcatggcggactcggaggtctgggtcatggtggactcggtggtctgggttccgactcaggagatctgggcggaatcggtggtcttttgggacctggtggtcgccgcggttggggcagacgtggtccaggaaaatattccgctagtgtttctatatcacactcaatctcgatcgaaagagtgattactcccggcgtttatacttcaatacatagatctgtttcggtttctcattcggtgtcggtcgaacatagaagaagaatcgcccctatcgtcgttgattactcaatatccagtagcttgtcgatctccggtgagggcagaggtcttggtagaggaaaacatggttggggtggcttgggtcacggtggacttggcggtttgggccatggaggtttgggaggactaggccacggtggtcttggtggcctcggacatggtggacttggtggtttaggaagcgacagtggtgaccttggaggaatcggaggtctattgggtcctggtggaagaagaggttggggacgtagaggtccaggtaagtactcagcatcagttagtatttcgcattccataagtattgagagagtcataacacctggtgtctacacttctatacacagatccgtctctgtgagccactcagtaagcgttgaacacagacgtagaatcgcaccaattgttgtagattacagcatctcttcaagcttatctatttctggagaaggtacgtcttc

SEQ ID NO: 2349 - DNA, 675 bp, synthetic construct
  misc_feature 1..675: note = Description of Artificial Sequence: Synthetic polynucleotide
  source 1..675: mol_type = other DNA
gaagacttaaggtagaggtctaggcagaggaaaacatggttggggtggcttgggtcacggcggtttaggtggactaggacacggtggtttgggtggtttaggtcacggaggactcggtggtctgggacatggtggattgggtggtctaggtagtgattccggtgatctgggtggaatcggtggattgttgggtcctggaggaagaaggggatggggtagaagaggccccggaaaatatagtgcaagcgtctccattagccattccatttcgattgaaagggtcattaccccaggcgtttacacttcaatacataggagcgtgagcgtctctcacagtgttagtattgaacgacctcgccgtatcattagtcctgtcgtagattattcattatcaatctcagcatcctcctctgtttctgctgaaggtggccgtcgtagaagattacctggatcctgcggtactattatttccgattcttcgagtaacgttggtggccttggaagaattggtgctctacacaagttgggtggaggccgaatcccaagacctgctatctataccagacaccctggactcaaaggattaaagccacaatgtcctctaagtaactttaatgttcatgtcaaagtaggaaacattagaaaagccaatggtaactgcggaggtacgtcttc

SEQ ID NO: 2350 - DNA, 789 bp, synthetic construct
  misc_feature 1..789: note = Description of Artificial Sequence: Synthetic polynucleotide
  source 1..789: mol_type = other DNA
gaagacttaaggttccagtgtaatcgacaagttggaagatttactgactcacggacaccatggtcaccattgggaaggcacagatggtttgcacgaaaaattgctgcaggaggatgacgtcattgaagccaactccaagggagagatcattgaaaaaattatctctagacgcgagattattacagacgataattctgaatctgaatcagattcagattcttctgaggactctggcagcacagagaagatcatcaagcaaattatcatcgtccaagagaagccgaagcatggacaccaccacgctaaggaaaagatatacgaagaagaaattattattaagaaaattggtgatttgcctaaaaaggattgtgatgaaaataagcctagagaagtaacttcgtggcgtcacactttacctaatagaaaaagtatttcaatctcaaaatccatctctattgaacaaataatcaaaccacatgtcatcacgagaatccgcacttctaagtctagttccttgtccatttcggtggagcgtcctagaagaataatttccccaattatctcgggtggttggaacagacacaaacctagaaagtacagcgcatcttcttccattagtaagtcgatctcaattgaaagggttatcactccagctgtgtggaccaggattcacaaatcagtgtccgtttctcattctgtttcagtagaacatagaaggcgaattgccccgatcgttgtggattactctatcagttctagtttatctatttctggtgaaggtacgtcttc

SEQ ID NO: 2351 - DNA, 1293 bp, synthetic construct
  misc_feature 1..1293: note = Description of Artificial Sequence: Synthetic polynucleotide
  source 1..1293: mol_type = other DNA
gaagacttaaggtagaagaagaggaccgtggggatacggcagaggattgtctggatccggtgacctagacggcctaggtggtgtgggaggactcggtggtttgggcggcttgggaggcagacggggtccttggggtaggggctatggcagttcgggaaccgttagtgtctctgtttccgtcgaagagggtagacgtcgtggaccatggggaagaagaggcaaagtatcaattagccgttctgtttccatcgagagaattgtaacgccaggtgtgtacacacaaatctccaggtcctcatcagtttctgtggaaggaggaaggagacgtggtccatggggacgaggttatggacctactggttccgtgagcgtttcagtttctgtagaaggtggtcgaaggcgaggtccttggggttatggaagaagattaggaggattgagcggtagcggagatttggatggcctaggtggtgttggaggtttaggaggactaggaggtttaggtggtaggcggggtccttgggttagaggttatggcagctcggtgtcagtcagtgttagtgtggagggtggtagacgacgaggaccgtggggtagacgaggtaaagtctctattagccgttcaggatctatcgaacgtattgtgaccccgggagtatacactaagatatctagatcatctagtgtgtccgttgaaggtggccgaaggcgtggtccctggggacgaggctacggtagctccggctccgtttccgttagcgttgaaggtggacgtagacgaggcccttggggaaggaggggtaaggtgtctatttctagaagcgtatccattgaaagaatagtcacccctggtatttacactaaaattagtagaagctcaagtgttagtgtcgaaggaggcaggcgcagaggaccttggggttacggtagaggactaggtggactctccggctcgggcgacctggacggattgggtggtgtcggtggactaggtggattaggaggtttgggaggacggagaggaccttggggacgtggatacggatcttcgggttctgttagcgtttccttatcggtcgaaggtgtgaggagacgcggaccttggggtagaagaggaaaagtctccatctccagatctgtctcaatagagagaatcgttaccccaggaagctacagcaagatttcccgttcctccagcgtttccgttgaaggaggaattcgtagaggcccatggggcagattcggtggttttgtttcctccggttcttcatcagtcgagtcaggtacgtcttc

SEQ ID NO: 2352 - DNA, 2223 bp, synthetic construct
  misc_feature 1..2223: note = Description of Artificial Sequence: Synthetic polynucleotide
  source 1..2223: mol_type = other DNA
gaagacttaaggtcctattgcaaactttgttggattcgtcatctctttgcttttctctttattcgaggtgatggtgtcagtcgttttcgacgtaaagtcctttacctctttgagcactccaacttgtaattctacggtgccatccttcgccactagagtcggtggtggtagattcagcggtatcataactgcttccttcaacatgatagctatgatcagtgctaacgtgcaagcaatacaatcaggctctggaagtaccagtggatcatcgtcctcctctactacatctacctccaacagtacaactactacttccaactccaccaccaccacgactaattcaactactactactagcaattccacatcctcttcaaattccacctcaagtggtcttacaagcagtgctagcgttgtctctctgatagatacaatcgcctgggtgtaccaggactcttcggttggaattgcttacttgatggtttctattttagctcttttctatggacaaagcgtttcagctccaccataccctgaccttggcattccagccttgccggctaattgctccggccctggagtcccacagtctgttcaaatcagagccgctattgcatatgtgaacatcacaatttacttcattaacatgacaggacaacaatttgaggatctacaaggtcccgttgccactgattgtggctgcccaaacacgacaagcgttgctccattagtccttgagtgggaagctatcttggctgccttgcaagccctggcaaacagtaccgcttctgctaacagcacgacttcatcaaactcaactaccactactacaaccaactctacatcaaccaccactacaaattctaccacaacaactaactcaacctcctcgtctaattcgtctaccatagctggatgtattgatatatctgcgaacttaactatcgctttgcagaacttgcaggctcttctattgcaagagagcacttgtgctccagcactcgctgcaaatgccaagaagtcgggagtgagggatatgtccccttgtaagcctggaaaaacagcaagtggatgtgccaaatctggcgaaaaaaaagttaaaagaaaggctaggctcgaaaagatgcgagcaaagtgccgtagagcggttggtaacagaatgaaaggatcaatgaagaaacgtgtgagatcacgcgccaagaagttcggtaaggccgcaaagtcgggtgtaaggcgctaccgaaaaaatattaaatacgtgtatatcccacctgttatggcctcccttaatgcttacgctgctctgatggcttcgttgtctgaatcaatttcttctcaatccgattccgctcttaactcgactgatcaagcctgtaactcaactggatctaacacggatgcagctgttattgctgctacgaacaacgtcacagacatgttcgcaaattttactgcaatggttttgaataatactgttgcttacccaaactgcacacagtttgctgatatggctttgctaatgatctctcagattaacgatcagatcatttcttgtggctcgcagtctgatgatgctgagtctagcatatactttaatgtaacaatgaatatcgtcgctatggctcaagagtataacaacttcgcttccatgtctgacaagtgtacaagatctttcgcgaattcttggctctggatgtatattaagtgggtgttttatcggatgggaatgacatcgggaattccaaattttctggcctgccaaactaaggctgagagttctctaactgcctttctggcatcatttaatgctactatcaatgccacaatagcagctgcttcggctaactcatcctcggttcagagttccgaagcttcttgcattgagagtagtctatctgacgcctcagctatcttggcaatgtatgagaacgcttaccagaactgcgtcgcacctggttccgttcctgatgctgccaatacaactacaacatctacgactactacgaccacaacaacaactactgctgccccaacgactactaccactaaagctgcaaacgctccattcacctacccactatgtaacctccagatgacggctgcttgcgtggcggctctaccaacatgtacctacccattcatttcatcagctggatgttgtccatctggtaagaccctaaacaccggtctgggtggaaggggatgttgtaaaggtacgtcttc

SEQ ID NO: 2353 - DNA, 915 bp, synthetic construct
  misc_feature 1..915: note = Description of Artificial Sequence: Synthetic polynucleotide
  source 1..915: mol_type = other DNA
gaagacttaaggttgcgagtgtggatgcgctgagctgaattgtccgcagaataagaaaccaaacaaagaaacatgcgagtgcgaatgtaagattctggctaagtgtaacgacggacaagtgtttaacaaggacacgtgttcttgtaattgtcctggaagcgcttcggacaaagtctgcaagaagcctcaaatctacaataacgagtcttgtaaatgtggctgtccggtagatatgcagaaaccaattgacggttgccctaggcctcaaagatgggagtctgattcatgtagttgcgaatgccctcttaaacaagattgcaaaaatggtaaagtgtgggacgcaaccatctgccaatgtatctgtcctcgtgatgcattgccatgcgctgctggtaaggaacgatgtggagaatcttgccaatgtaaatgcatcaatagagagccaaaagaaggatgttcaaagtcacttgtctggaatgaggacaaatgtgaatgtgtatgcccagcaggtaagcagatgcctgttggtggttgcgagtctggtaaatcctttaacgcattgacatgtcaatgtgagtgtgacgagtccgcttcaaagtgcggaaacaaacgttggaacgcggatacatgtaagtgtgaatgtcaacctggaaaaccgccagaaggttgtggcaagcaaacctggatctctgaaaagtgtaaatgcgaatgttctcctgctattacctgcgaggccccacaaatcttggatccaaacacctgtgagtgcaaatgtcctgtcaatatgcttgccgaaaaggagaaatgtaaactaccaagacaatggacagactccaaatgcttgtgtcaatgtcctaccgccccagtgacttgtgaaggtaaagaaacctggtgtggtgaaacaggtacgtcttc

SEQ ID NO: 2354 - DNA, 912 bp, synthetic construct
  misc_feature 1..912: note = Description of Artificial Sequence: Synthetic polynucleotide
  source 1..912: mol_type = other DNA
gaagacttaaggttgccaatgtgagtgtaaaaacaaacaagagatggctaactgcaaatctccaagaacatggaactatgacacttgcaaatgtgattgcaagaacgcggatgattcagatgattgtgttaagccacaaatttggttggataaccaatgtaaatgtggctgcccagcatcagcccagatgacttgcgccgacaacaaacgattcatagaaaagtcttgtaagtgcgaatgcaagttagctatgcctgccactattccgccaggaaaaaaatggaacgaggataaatgtgtcctcgaatgtgcaaacgttaagacttgtgagggtcctcagagatggtgcgataatcagtgcaagtgcatctgcccgcaagttaacactaagtgttcggacaagcagaagtttatcgagtctaaatgcgagtgtggctgtgacacgcaaacgcaatgtaagaacggattcagatggtctaacttagagtgcggttgcctgtgtgatgagaaaaaatgccagggtaagcaagtgttcgacaagaatacttgtcagtgtaaatgcccaaatcaaaagccaggtgacacatgcggaaacggaaaagatttttgtccacttgattgttcttgtaaatgtaagtctcctaaaccagctaatggctgccctggtgttcaagaatggaacgaagaaaaatgtcagtgtgagtgtcctaaggacaaaccaaaaaagcaatgtcctggaggtcaagattggaataaccacttgtgtcaatgtggatgtccaactcctgcgcccacttgtagcaataagcagaagtacagtaatgtttcttgttcttgcggttgtaagcccggtaaacctaaggaaggcagacctggtaagcaaatctggtgcgaaaacacaggtacgtcttc

SEQ ID NO: 2355 - DNA, 918 bp, synthetic construct
  misc_feature 1..918: note = Description of Artificial Sequence: Synthetic polynucleotide
  source 1..918: mol_type = other DNA
gaagacttaaggttgccagtgcgaatgccctaaaccaatgcctacggagggttgcggaccacaaagctggaacggagagtcctgtaaatgtgaatgcccttcatctattacttgttcctctcctcaaattattgacaaagatacttgtgagtgtaagtgccctaaaaatatgctagctgataaggaaaaatgcacggccccacgacaatggatcgattcaagctgttcttgcaaatgccctaccactccagctgtgtgtgagggtaaccaaaaatggtgtgacgaatcctgccaatgcacttgccctggtggtaagaaagagtgcggtgacaacaagtactttgatgagtcaagttgtgaatgtaagtgtaagtctaatcctacctgttcggacccacaaatttgggatgctgacgactgttcgtgtaagtgtccgaaggataaaaaaatgccgaagggcggttgtcttaatggacaagagtggaacaaactagcctgttcctgtggttgccctgaaccacgtcctgtttgtactgacgagcagacatataacaataatacgtgtaaatgcggttgtggcattgacaagccttcatgcccgaagcaacaaacttacaattggaataagtgccagtgtggttgtccagaggaaatgaagaagccagccggaggttgcggtgctaagacatggttggaagaagattgtcagtgcaattgcgttcctggtaaacctgctggaggttgcttgggtgctcaaaagtggtgcgacgacgaatgtatttgtaagtgcagtaacagtgaaccagccaagggatgtggaaataaacagtggtctgatgtcagttgtgattgtgagtgcccaactaaaaagacctgtgcggatcctcaggtttgggacgctaacacaggtacgtcttc

SEQ ID NO: 2356 - DNA, 879 bp, synthetic construct
  misc_feature 1..879: note = Description of Artificial Sequence: Synthetic polynucleotide
  source 1..879: mol_type = other DNA
gaagacttaaggtccatacggcgacggtttgggtccaagaggatatagtgcgtccgctagccagtccggcgaaggcggttggggatacggaccttacggcggtagtcttggaccatatggaggttccttgggacctagaggatactccgcttctgcctctagaagcgttgagggaggatggggttatggcccttacggaggcggtgtaggtccatatggtggaagtttaggaccatacggagatggcctcggaccatatggctctggagtcggtccgtacggtgatggattgggaccatacggaggtggtgttggtccatacggagacggacttggtccttatggcggatctttaggtccttacggtgatggattaggtccttatggtggaggagtcggaccttacggtgacggtcttggaccatacggcggttctttgggaccatatggtgatggactcggtccaagaggttactccgcctccgcatcccagtccggtgaaggtggctggggttatggcccatatggcggctcactcggaccatatggtggttcccttggaccacgcggatactcggcatctgcttcacgtagtgtcgagggtggatggggttacggtccgtacggtggaggtgttggcccatacggaggaagcctaggaccttacggagacggactgggtccatatggatccggtgtaggaccttatggtgatggtcttggtccttacggtggtggtgttggtccttatggagatggattgggtccatacggaggatctttgggaccatacggtgatggtctgggcccatacggtggcggtgtcggtccttatggagacggattgggtccttatggtggctccttaggtacgtcttc

SEQ ID NO: 2357 - DNA, 981 bp, synthetic construct
  misc_feature 1..981: note = Description of Artificial Sequence: Synthetic polynucleotide
  source 1..981: mol_type = other DNA
gaagacttaaggttccgcaggagcctctagtaacggatccgttgctggtgcatcaaaaggtgccgcaggagcttcaagtaacggttcatccgcttcagctagtaagggaagtgctggagcaagttcaggatcgtctacggccactgccagtaaaggatccgctggagcctcttcaaatggttcatctgcttcagctactaaaggatcggctggagcttcttccggaaacagtacagccgtagcctccaaaggcagtgcaggcgcaagtagtaatggcagttctgcttctgcatctaaaggttctgcaggagcctcttctcagggatcgtctgctagtgcgacaaaaggatcagctggcgcgacctcaaatggatctagtgccgtcgctagtaaaggttcggccggtgcttccagtggaaacagcactgcttctgccactaaaggtagttcttctgctagtagtaacggaagctctgctggtgcatctaaggacggagctggcgccgctagcaacggttccacggccgtggcgtctaagggttccgctggagctgcctccggcaacagtactgcatccgctacaaaaggttcctcctccgctagctctaacggatcctctgctaccgcctccaagggttccgccggagctacttctaatggatcctctgccgttgcttcaaaaggaagcgccggagctagttccggaaattcgacagcttcagcatcaaaaggttctgccggagcttcttcaaacggatcttcagccacagcaactaagggatcagctggagcaacctcaaacggaagctcagctgtggcatcgaagggatccgccggtgcttcctcaggtaattcaacagcaagtgcttcaaaaggcagtgcgggtgcttcgagtaatggatcatcggctaccgcgacaaaaggttctgctggtgccacatccaatggttcgtcagctgtggcatcaaaaggtacgtcttc

SEQ ID NO: 2358 - DNA, 498 bp, synthetic construct
  misc_feature 1..498: note = Description of Artificial Sequence: Synthetic polynucleotide
  source 1..498: mol_type = other DNA
gaagacttaaggtcatccaacagattgcggcaactcaggaggctctagtggctcatctgctgcatccggagccgcttcctcttctggatcgggttctgcagctggatcaggtgcggcctcaggttccggagcagcctccggatctggagcagctagtggtagtggtgccgcttcaggtagtggtgctgcatcgggtagtggcgccgcaagtggctctggcgctgcatcaggaagtggcgccgcatctggcagtggcgctgcatctggttcgggagctgcctctggttcaggagctgccagtggatctggtgctgcttcgggctcaggagcagcgagtggttcgggagcagcttcaggctcgggatcagcttccggctccggtagcgcttccggttcaggatcctcttctggttcaggttcctctggttgtggatcaggaggctcagcatcaggatcctccggtggttcctcagcttcggcttctaaaggtacgtcttc

SEQ ID NO: 2359 - DNA, 579 bp, synthetic construct
  misc_feature 1..579: note = Description of Artificial Sequence: Synthetic polynucleotide
  source 1..579: mol_type = other DNA
gaagacttaaggtagtgcgggtgcctcatctggtaactccacagcttcagccagcaaaggatcagccggtgcctcttcaaacggttcctcagcaactgcttctaagggatctgcaggagctacctccaacggctcatcagcagtagcttccaagggtagtgctggtgcgagttccggcaatagtactgcttctgcctcaaaaggatccgctggtgcatcgtctgatggttcatctgcttcagcatcaaagggcagcgcaggagctacttctaacggctcctcagctgtcgcttcaaaaggctctgccggtgccagctccggtaattccacagcctcagcttcaaagggaagtgctggtgcttcctcaggaggaagtaccgcggcagcctctaagggatccgcatctgcaagtagcgacggtttttcagcagcttgtgactccggtgaatctgaggcagtggacaaagcgaacctagcagccattgccaatattgccgctgcagcaggtaagccagccgcatgtggttccgcaccaccttctgacgactattacgattacggttgtggaggtacgtcttc

SEQ ID NO: 2360 - DNA, 789 bp, synthetic construct
  misc_feature 1..789: note = Description of Artificial Sequence: Synthetic polynucleotide
  source 1..789: mol_type = other DNA
gaagacttaaggtagctcggctagtgcctcgaaaaactccgctggtgccagctcaaacggctcatcagccggagcaagttctggttcagccggtgcttcgagtggtggatcttctgcatccgctacgaagggctcagctggagcatcgagtggcggaagttccgctggcgcatcaagtggttcagctggcgcttcttccggcggctcttctgcctccgctaccaagggatccgctggtgcttcctctggttcaagttccgctggtgcatccaatggtagtgctggtgcatcctccggaggttctacagcaagtgctacaaaaggctctgcaggagcatcctcaggaggatcgacagccggtgcatcgaacggaagtgcaggagccagtagtggtggatccagcgcatcagctactaaggaaagtgcaggcgcctcttcaaacggatccagtgccggcgcctcgaacggcagtgctggtgccagttctggtggttcatcagcttctgcaactaaaaactcagctggagctagctctggtaattcctctgcgggcgcatcaaatggttctgcttctagcagctctggatcctcctcctctaccgccacaaaggaaagcgccggtgcctcgtctaatggcagcactgcttctgcaagtaaagatagtgctggagcttcatctggaggttctagtgctggagccacctgtagcggagctggagctgcttctggaggttccgtctcaagtgcaactaagaattcttccgctgcatcttcacaaggtacgtcttc

SEQ ID NO: 2361 - DNA, 885 bp, synthetic construct
  misc_feature 1..885: note = Description of Artificial Sequence: Synthetic polynucleotide
  source 1..885: mol_type = other DNA
gaagacttaaggttcctcaggtggtgccacttcttccgctggcgctggatcagcttctggctcctcgggaggaagtacttcgggagcctccgccggatcggccagcggatcttccggtggatctagttcttcggcgggtagtggttctgcctccggtagctctggcgactcgtctagttccgccggatctggaactgcttcaggaagtagcggcggtgccacttctagtgctggcgcaggatctgcctcgggatcctccggtggttctacatctggagcaagtgccggatcagcatcgggctcttcaggtggaagttccagttcagcaggttcaggaagtgcatctggatccagtggcgattcatcgtcatcagctggttccggaactgcaagcggatcttcgggtggtgcaacatcttctgctggagctggatccgccagtggaagttctggaggttcgacttccggtgcttctgcaggaagtgcttccggaagtagtggaggatctagtagttctgcaggttctggaagcgcatccggttcatctggagactcttcgtctagtgctggaagcggaagcgcgagcggcagctcaggaggttctacttcaggagcatctgccggttcagcatcaggttcttcgggtggctcgtcaagttccgctggttctggtagtgccagcggttcatccggtgattcaagttcatcagctggctctggatctgcttccggatcttcatgtggatcaacctccggcgcttccaatggctccgcttcaggaagttcgggtggaagctcttcatctgctggatcaggttcggctagtggatcctccggagattcctccagctctgcaggatctggcagtgcttcaggtacgtcttc

SEQ ID NO: 2362 - DNA, 420 bp, synthetic construct
  misc_feature 1..420: note = Description of Artificial Sequence: Synthetic polynucleotide
  source 1..420: mol_type = other DNA
gaagacttaaggtcaagatagtggatgtaatgtcattgcctaccctactgcttcatgtggtgatagtggatcaggctccgccgcttcttctggtgcggcgagtagttccggctccggatccgccagtggaagtggagcagctagtggtagcggaagtgccagtggtagtggagcggcatcaggttccggatcagctgcaggaagtggagccgcttctggatccggagctgctagcggatctggatcggcctccggttctggttccgcatctggcagcggctctgccgctggttctggcgccgcttcaggatccggtagtgctagtggttcaggtagtagttcttcaggatcttctagttctggatcctcaggaggatgtggaggtggctctggttctgcaagttccggaggtacgtcttc

SEQ ID NO: 2363 - DNA, 507 bp, synthetic construct
  misc_feature 1..507: note = Description of Artificial Sequence: Synthetic polynucleotide
  source 1..507: mol_type = other DNA
gaagacttaaggttcgtcgggcggatcctccagtgcagccggtagtggatccgcttccggagcatctggaggagctacctctgctgcaggaagcggttctgcttcaggatcttctggaggatcttcttcaggagctagttcaggttcagcctctggctcctctggaggttgtggttctggaggaagttccggaagtggtagtggaagtgcttcaggaagcggtagtgcttctggcagtggatctgcatcaggttctggatctgcctctggaagtggagccgctagtggtagcggagctgcttccggatctggcgctgcttccggtagtggagcagcctccggttctggagccgcttctggatcaggagctgcaagtggatcgggtgccgcttcaggttccgccgccgcttctggtgccgcttcttcctctggatccgctagtggctcaggttcaggttctggttctagtgacgattctgaggacgactcttgtggaggtacgtcttc

SEQ ID NO: 2364 - DNA, 651 bp, synthetic construct
  misc_feature 1..651: note = Description of Artificial Sequence: Synthetic polynucleotide
  source 1..651: mol_type = other DNA
gaagacttaaggtgctaatggagcagctgctgcttcagctgctgctgctgcggctagaagagcaggagctattggtttgaacggagcagcgggcgctaatgtagctgttgctggcggtaagaagggcggagccgctggtcttaatgcaggcgctggtgcctcattggtatccgccgcggcaagaagaaacggtgctctcggactcaacggagctgctggtgcaaacttggcagctgctggaggtaaaaaaggtggtgctattggacttaacgctggtgcttcagccaatgtcggtgcagctgctgctaagaaaaatggtgcaataggtttgaattccgccgcatctgccaacgctgccgctgcggctgccaaaaaaggtggagcaattggacttaatgcaggagcctcagcgaacgcagctgcagctgcagctaagaaatctggtgctgtaggtctaaacgcaggagcgagcgctaacgccgctgcagctgccgcaaagaaatcgggtgcagtggctgcaaactctgctgcttcagcaaatgctgcagcggcagcacagaaaaaagccgccgctgatgctgctaatgctgccgctagtgaatcagctgccgcagccgccgctaagaaggccgctgctgtaggtacgtcttc

SEQ ID NO: 2365 - DNA, 621 bp, synthetic construct
  misc_feature 1..621: note = Description of Artificial Sequence: Synthetic polynucleotide
  source 1..621: mol_type = other DNA
gaagacttaaggttccgcttccggttcagctagtggttcaaagtccgaaagtggatctgcatctggatctgccagtggaagtaaatcagagtctggttctgcctctggtagcgagtccggctccgctcaaggtggaggttctaaaagcgaaagtggcagttcctcgggttcggcttctggctctaagagcgaatctggttcggcatcaggttccgcctctggatctaagtcagagtccggatccgcttccggctcaggatcaggatctaaatccgaatcaggctctgcttccggatcagcgtctggttcaaagtcggaaagtggatctgcttcaggtagtgcttctggatccaagtccgaatcgggatctgctagcggaagcgaatctggttcagcacaaggaggtggttccaagtcagaaagtggaagtagttcaggttcggcttccggatcaaagtctgagtctggtagtgcatccggttcagccagcggaagtaaatccgagtccggctctgcctcaggttccggttctggttccaaaagcgaatccggttccgcaagtggatccgaaagcggttcagcagccggaggtggctccaaatccgaatcaggtacgtcttc

SEQ ID NO: 2366 - DNA, 819 bp, synthetic construct
  misc_feature 1..819: note = Description of Artificial Sequence: Synthetic polynucleotide
  source 1..819: mol_type = other DNA
gaagacttaaggtgctgtttacctaagactgtcctctgacggttcatgcccagctgaccaggtttgttgtcgcgaagaggactctaatgaaatctgcggcggtacatgtgtgcctgagggagcctgtgaagccggtggtatcaacctgagggttggaggtgccggaggtggatgtagctttggagagatatgctgtgatttgccgcttaaccgatgcagaggaacttgcactactgtagatctgtgcggtgataataggagagtggacttaagattcgaggatcagctgtgtcctggttcgcaagtctgttgtgagaagtccaagacaaacgctatctgtcacggaagatgcgtcgctgctaatgaatgttcgagatcctctaacttagtggacctgcgtgtacaatcgaacgatggatgcccaggtgacagaatttgttgccagaatacgtgtgagggacaatgtgttccaagaggacagtgtggtgatgatacaaaagacattgaccttagagttggcgattcttcctgtcccgaaaatcaggtgtgttgtaagaatccaagaacctgcacttgcgtcgatccatctaaatgtccccaaatgataaaccttcgctttagttcagaatgtccatttcaccaagtttgctgcgacagcgtcagcgactctaattgtcaaggtctatgtaccccagatgaccaatgtaaggttcgctcaaatggaacctgcagtggtggtcttacatgttgtggtaaaataaagccatcttgtgatggttcttgtgtgtcccttggacaatgcccgacaggtacgtcttc

SEQ ID NO: 2367 - DNA, 795 bp, synthetic construct
  misc_feature 1..795: note = Description of Artificial Sequence: Synthetic polynucleotide
  source 1..795: mol_type = other DNA
gaagacttaaggttgccctgcaaaccagcaagacccgtttgctgtgtgttgtaggaatgcgagtaaactttgtaacggttcttgtgttagtcaagagcagtgcgccgacagtggcttcgatttgagaatatcttctcaaacttgtccaggcaacgctgtctgctgtaagaacctgagcaagtcaccaacaggtaaagtctgccagggaagatgtgtacccagccagcaatgtactggacaatctcaaaactcggtcgacttgaggttttctgaaggtctatgtcctttaaacctagtctgttgtccagcaagtacgtcttgttcgggttcatgtgttgccggtaatagatgcctggacaacgctttgtccattaatcttagacgttcgactgaatcttgccccgcaggattggtatgctgccagaatgttaacaaaggttctacttgtgatggacagtgtaccagtcgtgacagatgcgctgacctcaccttgggaatcaacttgagactatctgatcagtcttgcccatccaatcagatatgttgtaagaaagtcaggaagcctttgcctgatgccgagtgtacctgcgtaatgctagaccaatgcgctgatgaccagagatcaatagacctaaggaccggtggtcaaaagtgtccatcaagaaaaatctgctgcacaaagctaaagaccacagtagaaaaatgtgatggctcctgtatctcataccaagactgtccagaaatagcaaatgcatcttctgttgatttgagattgttttccggaggtacgtcttc

SEQ ID NO: 2368 - DNA, 1152 bp, synthetic construct
  misc_feature 1..1152: note = Description of Artificial Sequence: Synthetic polynucleotide
  source 1..1152: mol_type = other DNA
gaagacttaaggtgttcctaaagaactgggtacctcaattagctcagcttctgctagtgctagtgcttcagcttccgccaccgcttcgtcctcttcaaagaacgtccatttattgcctttaaaaagtgaacatggaattgtaatcgacaagtctaaatttaacattaggaaagtggtcttgtccgcaattgatgaaattaacggagctcctaatattggtctaggtttgaagcaagtaagcttggctcttgcaaaggctcaagcaagtgctcagtcctccgccgaggccctggccatcattaagaaaattgtcgctctacttattagtgcctatgttcgtgcagcagaagccgccgcaagagcttctgccgaggctctggctactgtgagagccgcagagcaggcacagaagattgctgaggccaagggccgtgcggctgctgaagctctgtctgagcttgtcgaagctagtcaaaaggcagatgctgccgcagctggtaccaccgacgctatcgagcgcacttatcaagacgctagggcagctacttccgcgcagactaaggcctccggcgaggccgaaaacgccaataggaatgctgctgctactttggccgcagtgttgagcatagcaaaggctgcttcaggacagggtggtacgcgtgctgctgttgatgccgctgctgctgcagcagccgccgcggccttgcatgcgaaggccaacgctgtgagccaagcgacatcgaaagcagccgctgaagctcgtgtcgctgcggaagaggccgctagtgctcaagcttcagcatcagcatctgcccaattgactgctcaactagaagagaaggtatctgcagatcaacaagctgcttcagcctccacagacacgtccgcagcaatagcagaggctgaggctgctgcattagcatccactgtgaatgccattaacgacggagtggttattggtttaggtaacaccgcttcttcgtctgcacaggcttcggctcaggcatctgctttagctagggccaaaaatgctagacctaagattaaaggttggtataaaatcggcggtgctacctccgcaagtgctagtgcctcagcttccgcatccgctcaaagctcatcacagggattggtttattcaggtacgtcttc

SEQ ID NO: 2369 - DNA, 1140 bp, synthetic construct
  misc_feature 1..1140: note = Description of Artificial Sequence: Synthetic polynucleotide
  source 1..1140: mol_type = other DNA
gaagacttaaggttcgaaaagctacttgttaggttcgagtgcctccgcatcggcctctgcatcagcatccgcatctgctggaggttcaactggaggtgtaggtgttggtagtgtaattagtggcggaaacaatattatccgtggtgcttccacaacatcggttactttagccgcagccgctgccgaagcaaaggccgctcttaatgccggtaaggccactgtcgaagaacaaagggaagccttgcaattactgaccgccagtgcagaaaaaaacgccgaagctcgttccttggcggacgacgctgccgttctcgtccagggtgctgcggaagcacagagtgttgctgctgctaaaactgtcgctgtggaacaaggatctaattctttagatgctgctgcagcggaggctgaggccgctgccgccgctagtagagtttccgctcaacaggccttgcaggccgctcaaacgtctgctgctgccatccagactgctgctggctccgctctcacagctcttaaactcgcaagaaaacaagaagctgagtctaacaacgcagccgaacaggcaaataaagcacttgcattatcgcgcgcagctagtgctgctactcaacgagcagtggctgctcaaaatgccgctgcagcttctgctgcttctgctggcgcagctcaggcggaggcaagaaacgcttatgccaaggcaaaggctgctattgctgccctaactgctgcccaaaggaattacgccgctgctaaggcctcagcatctgccggaagcgttgtggctgagcaagacgctcaatctagagctgccgacgctgaggttaatgcggttgctcaggctgctgctcgcgccagtgtcagaaaccaagagatagtagagattggtgctgaatttggaaatgcgtccggaggagttatctctactggaactaggtcatctggtggtaaaggcgtttctgtgactgctggtgctcaggcttccgcttctgcgtctgctacgagctcatccagtagttcgtccggaatcaacaagggacatcctagatggggacataactggggtctgggtagctctgaggcatctgctaatgctgaagctgaatctagtgcatcttcatactcatcaggtacgtcttc

SEQ ID NO: 2370 - DNA, 1296 bp, synthetic construct
  misc_feature 1..1296: note = Description of Artificial Sequence: Synthetic polynucleotide
  source 1..1296: mol_type = other DNA
gaagacttaaggttctgaattggttggatctgatgcttccgccaccgcgtcagctgaggcatcagcctcgtcctctgcttacggatcaaaatatggtattggtagcggtgcagtgtctggtgcttctgcatccgcatcggcatctgctagcgcctccgcaagtgctagtagtgctccagccatcgaaggagtaaatgttggcactggagtttctaacactgcatctgcctctgctgaggctctttctagaggtctgggaattggccaagcggccgctgaagctcaagctgccgctgcaggtcaagctgctattgctgcaaagtcgtgtgctttggccgcaaaatcaactgcacaggctgtcgctctggttgaaaaagttgccagagctgaagttgaccttgccgagtctgccaggaaggcgaccagattgtcagctgaggcggctaaagctgctgctgaggttgaaaaagacttagttggactcagaggcgccgctggaaaactgaatttggccgctagggcaggcagcaaagcacaggagagagccaatgaagatagtattgaggctaacgagcttgcccaggccactgctgcagctggtgctgaagccgaggctaaggccaatgcagcacaggaggctggtgcaagtgctcttgctattgcacaagcagctttgaatatagaacaagagactgttaaactcacgagacaagcacaaaatacaagactacgatctgagaatatcctggcagccgccagtaatgcgcgtgctattgcttccgcagaggctgaggccagtagtgacctcaacaatagagccaacgcagctagatcaaacgccagggctgctgctgagactcgtgctgttgccacagaggccgcttctaccgccgaaatagccgcttactcttcctcggaaaagggtgaaattaccaacccaggccctctgcctaaaattgtatcggtgactgctggtcttacacagaacgaaattgctggttcaggtgctgctgcatccgctagtgcttccgctctggcttctgctagtgctggagctggtgcgggtgctggcgctggtgctggtgcttcggcaggagccggcgctgtagcaggagccggtgccggtgctggtgccggagcttctgctggagcctccgctggtgctaacgctggagcgggagctagttctttgctattgcctcaatcaaagcttcatccaattagtcgatcctctgcttccgcttctgcatctgccgaagctgaggccaactcttctgcatatgcaggtacgtcttc

SEQ ID NO: 2371 - DNA, 1164 bp, synthetic construct
  misc_feature 1..1164: note = Description of Artificial Sequence: Synthetic polynucleotide
  source 1..1164: mol_type = other DNA
gaagacttaaggtgttattggtccagacacatcctcttcttcgcaggcatctgcttccgcttcggcttcggctagtgcctccgcatcttcttcagcgagtattggttacaacgagctgcacaaatcgatcaatgctccagcactggctgtgggtgttaagaatggaggtgtagatgtggctaagggagctgccgttgtcgagtcagctatttctgatgttagtactttgactgacgacagaaccttgaacggtttggcaatcataggcaattctgctgaatccctggcaagagcacaagcaagttcttctgcctctgctggcgccaaggctaacgcactgataaaacaatcgatcgctgctatagagatcacggagaaggctgaatatttagcatcgatagttgcgaccaaagcagctaaagcagcggaagcaacggcagccgctaccgctagggctactgccgttgctgaagccgctaaagtttcttccgagcaatttgcagctgaggctagagcagctgccgatgccgaggctaaagccaacgctgcttcaatcattgccaacaaggcaaatgccgttttagctgaagcagcaaccggtttgtctgcgtctgctggaaaagcacaacaatcagctactagagcattacaggcagctagagctgccgccaaggcacaagctgagcttacacaaaaggctgcacagatacttgttcttatcgcagaggcaaaggctgctgtatctcgtgcctcggccgatcaatctgtgtgtacatcacaggcgcaggccgcatcccaaattcaaagtagagcttctgctgctgaatcagcagcttccgcccagagcgaggccaatactatcgccgcagaggcagttgctagagctgatgcagaagctgcctcccaagcacaagcttgggccgagtcattcaaaagagaactgagttccgttgtcttggaggctgaagctaatgctagtgcttctgcttcggcgggcgccctcgcctctggttctagttcaagcggtgcttcgtcaagtgcagatgcaagtgcaggagcttcctcctatggttctctaggaggttatcgccacggtggatcgttttccgaggcctctgctgcagcgtcagccgctagcagagcggaagcggcaggtacgtcttc

SEQ ID NO: 2372 - DNA, 1152 bp, synthetic construct
  misc_feature 1..1152: note = Description of Artificial Sequence: Synthetic polynucleotide
  source 1..1152: mol_type = other DNA
gaagacttaaggtaaccttcttaaagagtctaaggcatccgcatctgcatctgccagcgcatcggctagagcttcaggtaaaaagaatttgcatgttcttccactaccgaaaaagagcgagcacggtattgtcattgataagagtgtgtttgacataaaagatgttgttctatccgctgttgacgaaattaatggtgccccaaagcttggtttgggatggaagaaagtctctatgggtgtggagagagccgaggctaatgctgctgccgccgctgaagctctggctatgataaaaaagatcgcaatggccagatcctctgcctatgttcaggcagcatgggcatccgctcaggcttccgctgacgcacttgcttctgcccgcgtcgctcaggcgtcgcaggaagccgctgaggcaaagggtcgcgccgcctccgaggctttgtccagagctatagaagcctcatctagagctgatgcagcagccgctgcgacattagatgctatggatagaacgatggaaaacgctagagctgccaacgctgcccaaactcaagcctctggtcaggccgaaaacgcgaatagatccgctgctgctattttagcagcattgctaagaattgccgaggcttctgccctgaataacgaggccgcagttaatgctgccgcagcagctgcagccgccagtgcattgcaagcaaaagcgaacgccgcatctcaagctaccgctcgtgctgcgggacaagcctctacagctgccgaagaggctcaatctgctcaggaggcagcagataaaaacgctgaactgactaccgttatgctggaaaaagcttcggctgatcaacaagccgcatccgcaagagcagactactatacagcttcgactgaggctgaagccgctgcacaagcctccgctatcaatgccttgagagatggaatcgtcgtcggtatgggcaacgacgctggagctagtgctcaggctatggcccaggtggaggccttagcaagagcaagcgaacacaaagcccttggcgagaagaaaaaaggtctggtatggggctacggttcgaaaggttcatcatctgcttccgcttctgcttcagcttctgccgaagcttcctctagattgggcaaggactggggaggtacgtcttc

SEQ ID NO: 2373 - DNA, 1233 bp, synthetic construct
  misc_feature 1..1233: note = Description of Artificial Sequence: Synthetic polynucleotide
  source 1..1233: mol_type = other DNA
gaagacttaaggttctggtcctcgccttcttggaggcaggagcgcagcttctgcatctgcttcagcgtctgcagaagcttccgcaggaggttggagaaaatccggtgcgagtgcttcagcttctgctaaagccggttcgtccaatattctaagtagagtgggcgcttccagagctgctgcaacattagttgcctcagccgcagttgaagctaaggctggattaagagctggaaaagctacggctgaagaacaacgtgaggcattggaaatgctgacgctatccgcagataagaatgctgaagcccgtattttggcagatgatacggcagtcttggtccagggttccgcagaagcacagtccgtggccgctgccaagaccgtagccgtcgaagaagagtcagcctccttagatgctgcagctgtcgaggcagaggttgctgccgcaacttctaaatcctctgccggtcaggctttacagtctgcccaaactgccgcttctgctcttcgtacttctgctaggtccgccctgactgctttaaagctagctcgtttgcaaggagccgcttcttccaacgcagcaagaatgatggagaaagcattggccgctacacaggacgcaaacgcagctgcccagcaagctatggcagctgaatccgctgctgcagaggccgccgccattgccgctgctaagcagtcagaggctcgtgatgctggagctgaagctaaagctgccatggctgctcttatcactgctcaaagaaacctggtccaggccaacgcacgtgctgagatggcttctgaggaggccgaacttgactcaaagagcagagctagcgacgcgaaggttaatgctgtagctcgtgcggccagcaaaagctctatcagaagggatgagcttatcgagatcggtgccgaattcggaaaagcatctggtgaggtcatctccactggaacaagatcaaatggtggccaagacgctattgctacggcagaggctagttcctcagcttccgccgtaggtattaaaaagacttctggtcattggggtagcggtaaatggagtcgtgtttctaaaggaaagggatgggcttcctcgaatgctgatgctgatgcgtcatcctccagcattattatcggcggactaaaaaggggtggcctgggatctgaggctagtgctgccgcttcagctgaagctgaagcctccgctggaacgttgcttttaggtacgtcttc

SEQ ID NO: 2374 - DNA, 1293 bp, synthetic construct
  misc_feature 1..1293: note = Description of Artificial Sequence: Synthetic polynucleotide
  source 1..1293: mol_type = other DNA
gaagacttaaggtagtgaacttgagtcggaagcttccgctgctgcttctgcccaggccgaggcctcatcctcgggaagatcaggtaaactgtcggcttcacaggcctctgccagtgcttccgcatccgctagcgctggatctagaggtggatctaaaggtggatggggtcaattacgacgtggagacgtgaaatctgaagctaagtccgctgccgctattgcagtcgagggagccaagatcggaactggaattggaaatactgctagtgcctccgctgaagctctgtctcgtggtctaggcattggacaagccgctgcagaggctcaagctgctgcagctggtcaggcagaagttgccgccaagtcttgcgaattggctgacaaaactactgccaaagccgtcgctatggttgaagccgctgccgaagctgagattgaggttgccaatcaagaggtggctgcggttaagttaagtacgtgggctgctaaggcagcaagaattgttgaggaagattctgctgcagttagagccgccgctggcaagttgttgctcgcagccagggctgcagcagctgctgaaagaagggccaacgaagaaagtgaagcagcaaacgaattagctcaagcttctagcgccgctgcggctgaggctgaagctaaggcaaacgctggaagagaggccgctgccgcagctttggctattgccgaagccgctgttgccattgaacaagaggctgttattctggcaagaaaggcccaggatgctagactaaatgccgaagctgctgccgctgctgctatgaacgcacgtgtaatagcttctgctgagagtgaggcaagtgaggatttggaaaatagagcatccgttgctagagcatctgcagcaggcgccgctgaggctaaggcaattgccaccgatgctggcgcaacggcagagatcgctgcctattcatgggccaaaaaaggagagttaatcaacccaggtccattgcctaaaataatttccgtcaacgctgacctttcaaagtcagaagtcgaggctatgaaaataacccgtggacaagtacaagaagtcaaaaagatttcaacgcataagggtggatggggatggggtaaggagggtagatccaaggtttcatcaaacgcttcagctagagcttccgcttctgccaacgcggctgcaggttcattgggatcaaagtggggtcgtcagttgagtgcttcctctgcctctgctgacgctaatgctgaagctgactctcaactgctcaaagtttggggaggtacgtcttc

SEQ ID NO: 2375 - DNA, 1200 bp, synthetic construct
  misc_feature 1..1200: note = Description of Artificial Sequence: Synthetic polynucleotide
  source 1..1200: mol_type = other DNA
gaagacttaaggtcgggtgattgagtcctcgtcctctgcctcggcccaagctagtgccagtgccggttctagaggccttttgggtaaaagaccaatcggtaagttggaatggggaaaggaggagaaaaagctcgaagagttggatgaggaatctttaaatgaggccgccttgaaggtaggtatcaagaacggcggccttgatgttgccaaaggcgctgccgtactggaagctgctatgtctgatgtagctacactaaccgatcagagatctcttgtcgatctgggacttggcccagtagctaacgaggccgaaatacttgctgaggcccaagctgcaacatccgcacaggctggtgctgttgcaaactctgctgctgaacgtgcaatcgctgctatggagatggctgataggacggaatatattgcagctcttgttacgactaaggctgcaaaagcggctgaagctacgatggcagcaacagccagagctacagcagctgcttcagcttccaaaatttccagccaagaatctgccgccagtgctgctaacgctgctaatgccgaggccaaggctaatgctgcctctattattgctaataaggctaacgctgtcctggctgaagcagctgcagtcttggctgccactgccgcaaaggctaaagagtccgccatgaaatcgctttctgctgcccaggccgctgctaaggcacaggctagaaacgcggaagcatctgctgaggctcagattaagttatctcaagctcgcgcggctgtcgctcgtgcagccgctgatcaagccgtttgctctagccaagcacaggccgcatcacagatccaatctcgcgcatcagcatcagagtcggctgcctctgcacaatccgaaactaacacggctgctgcagaggccgttgctactgctgacgccgaggctgcagctcaggccgaagcttgggttatgtcattaaaaaatgatctttggttgcaccttaatatgaagggtgaagctaaagcagagggcgaagccgtttcgatctcaaaaggacatcgtggtggaattagaagtggatcaatctcggaggcttcagcagaagcatcctcgaatgtttcaatgggaggacgacatggaagaaaagatctagtctcagaggccttggccggcgcttccgctggatcaagtgcggattccctaggtacgtcttc

SEQ ID NO: 2376 - DNA, 960 bp, synthetic construct
  misc_feature 1..960: note = Description of Artificial Sequence: Synthetic polynucleotide
  source 1..960: mol_type = other DNA
gaagacttaaggttcagtcgagttgggcgccccaaagcaagaatcggtacttgttgagcaattgcttttgaagaatgtggaaacctccgccaaacgcaaagaaaatggagccccaaagttaggcgagtccacggctgctgcacttgcctctaccaaggcaactgctgcagccgaagctaaggccagcgccaaagtgaaggcttctgctttggccttggctgaagctttcttgagagcttcagctgcgttcgccgctgctagcgcaaaggctgcagctgccgttaaagaggctacccaagcccaacttttggcacaagaaaaggcgttaattgcccttaaaacacaatcggagcaacaagccgcatctgcgagagctgatgccgccgccgctgctgctgtttctgctctagagcgcgctcaagcatcttcaagagccgccaccactgctcaagatatcagctctgatctcgaaaagagagtggctacttctgcagcagctgaagctggagctacacttagagcagaacaatccgctgcacaatctaagtggtcagcagccttggcagcacagacagccgctgctgccgctgcaattgaagccaaagctacagcttcgtctgaatctacagctgccgctaccagtaaggcggctgtattgactgctgatacctcaagcgctgaggctgcggctgccgctgaagctcaatcagcttcaagaatagcaggaactgcagcaacagagggatctgctaactgggcctcagaaaacagtagaacagcccaactggaagcctctgccagtgctaaagctaccgcggctgctgcagtaggagatggagcaatcatcggtttggctagagatgcaagtgctgcagctcaagccgctgctgaagtcaaggcactagcagaagcttctgcttcgcttggtgcttctgaaaaagataagaaaggtacgtcttc

SEQ ID NO: 2377 - DNA, 945 bp, synthetic construct
  misc_feature 1..945: note = Description of Artificial Sequence: Synthetic polynucleotide
  source 1..945: mol_type = other DNA
gaagacttaaggtcagagttctccattattagagattgttcaaggaagcgccagtgctaccgcttccacggctgtgactgctagatctggtctgagagctggccaagtggctgtagcttcacagaaggatgccactctgcaggcagacgcttctgccgccgcagctgctgctgccagagcctcagctgaccagtccgcctcattagctcagcaatccgcctctcttcaatctaaggctgccgcacgtgctaaaagtgcagaagagtctgctgccgctaccgccaaagctgagttgcaggcagaatctatagctgcttcagcttcttcaaatgcacgtgaagcagctgcgtccgccaaggctagcgcctctgccatgtctagtgctgctgtccaagccaaattggctgaaaagacagccaaaaaccaagccttggcgtcagaggaagccaaacttaaggcggccgctgcagcttctgctgcagctgcagctagcgccgccgccgaggccgctcttaaagctgagagaattgccgaagaagccattgctaaagctgccgctgcaaaggctgctgctagagcagctgcagcagccttgaattctgctaaagaggctgcaacctcgtctgccaggtcagcagctgaagccgaggctaaatccgaagtcgctatattgatctcagaattggacaagaagtcacgagaggtagctgcctctgcgtcggcaaaagctagagcagccgctgccgcttcctcgcgtaatgcagaaaccgcggttatcggcgcaaatatcaatgtcgcaaaagaggtgcttgcaattccaattgagcctaaaaagttgccagagcctgagttggctcttaaagaagaaaatgttgccgttgcatcttctgagagcgaagttaaggttgaaacatcttctgaagcttggtctataggtacgtcttc

SEQ ID NO: 2378 - DNA, 1035 bp, synthetic construct
  misc_feature 1..1035: note = Description of Artificial Sequence: Synthetic polynucleotide
  source 1..1035: mol_type = other DNA
gaagacttaaggtaaacctctgattgctaatgcccaaataggtaaggtcaagaccgagacgtcctcttcatcggagatagaaactttggtttcaggaagtcaaacattagtcgccggatctgaaaccctggcttccgagtccgaagcccttgcctctaagtcagaagctcttacctctgaggccgagatcgcttctgtcacaactaaagatgaacttattctaaagggtgaagccatcacaggcaaaaagttgggtacaggtgcatctgaagttgctgccgcttccggtgaggccattgctaccaccttaggtgcaggtcaggcagcagccgaagcccaagctgcagccgcagctcaggcgaaaagtgcagcggcagcagctgctaatgcaggagaaagttccaacagcgcagccgccttggttgcggctgctgcagctgcccagggtaaggctgctgccgcagcggctgcagctactaaggcatccttggaggcagccgatgctgcagaagaagccgaaagcgctgttgccttagctagagctgcttcagctaaagccgaagctttggcctctacagcagctgctgctaatactagagcggctttacaagctgaaaaatctaacgagttggctcaggcagaagccgctgccgccgccgaggcgcaagccaaagctgcagctgcggccaaggctactcagctcgcattgaaggtcgcagaaaccgctgttaagactgaagctgatgctgccgccgcagctgtcgctgctgccaaggcacgagctgtggctgatgctgctgcttcccgtgctacagctgttaatgctatcgctgaagcagaggagagagattctgctcaagcagagaatacggctggagtagctcaggctgcccttgctgccgcagaggcacaagatagctgtattggagcagctgctactcctaggcactcttcttcttatgcttggtggaaattacgcattacctcactcatagtcattctgagccctcgaaacaggagaacaggtacgtcttc

SEQ ID NO: 2379 - DNA, 906 bp, synthetic construct
  misc_feature 1..906: note = Description of Artificial Sequence: Synthetic polynucleotide
  source 1..906: mol_type = other DNA
gaagacttaaggtcatgttgtgaaaagagataaggagcttaaggctccagctcttccagagttactgggagacggatcagacactttaggtgctagtatggagaatggtattaaagttgctagagccagccaaaacgttggactacgtactgagttaaatgctgccgcaagagcagcagccgccgccgctaccaagcaagcaaaagacactgaggctgctgaagctggtgcagccgcagctattgcaatcgccattgccaaacgagaggaagctatcaaagcaagcgaattggcgtctaaacttttgactgccgcagctggttcgtcagaggctgctgtatctgccactgttagagctgctcagttgaccgctgctgcttctgccgctgccaaggctagtgctagtgcttcagaagcttccgccgaagcccaggttagagctaacgccgaagctaatattgcaaaaaaggcctcggccgctgaagccaaggccgcagcagaggctcaagtcaaagccgaattagccaaaaaggccgccgcgggtttcttagctaaagctcggttggctgcctctgcggaatccgaagcaacaaagctcgcagcagaagccgaagttgccttggccaaggcaagagttgctgtcgatcaatcccaatcagctcaagcaaccgccactgctcaggctgctaccgccgttcagttgcaaagtcaggccgctaacgcggaggccagtgctgttgctcaagcagagactttgctcgttacagcagaagcagtcagtgctgctgaggcggaggccgctacaaaggctacgtcatggggcgaggaatgtcatcaaagagaaaaagtcacatttagcgaagatagattgaatgaaagacaagataattggggaggtacgtcttc

SEQ ID NO: 2380 - DNA, 1485 bp, synthetic construct
  misc_feature 1..1485: note = Description of Artificial Sequence: Synthetic polynucleotide
  source 1..1485: mol_type = other DNA
gaagacttaaggtgacagatcttgggcagctagtgatgcaaatgctgaagcttctgctgctgttgagtctccttctctctgggaggactcaagttcagcttctgccggagcatcaaatgcggcagaaagctcaagcctctgggaagattctagttcggagaataccggagcctctaccgccgctgagagttcttccttgtgggaggattcaagttctgccagtgccagagcgagcacagcagctggttcgtcaagtgcgtgggaagattcttctataaccaacgcgagagagtctggtgcttcgggttcactctcatcctgggaagattcatcttcagcatctgcttcttcctccaccagtgctagtgcttctagttcctccagtagttcttcctcgatttcttcttcagccagtagcagctcatctgccagtgcaagcgccagtacagaggcctctaatgagtcaagaaggggcattgctatcgaaggagctttggttggtacgggtgctgcgagtacggctgcagccagtgcggagatgttgagcgacacattgggacttggtcaaagcgctttacaggctcagacagcatcagtcacgcaagctaatattgcatctgacgcttcgaaccaggccaatcgcttggctgccgccgctgccgccgctatgtctgccgcagcctcagcacaagagaatgctgctagcctagcaagagcttcggcatccgcctctgaaagcgctgcttcagcatcttcaaaggcagaagcatctgccgaggcagcaaagtctagtgccgaaaagtgtcttttacttgctcagaactcagctcaagctcaagccagagctactgagcaaagcgagtcatctaatcgtgattctgcagcaaacgccgcagctgcagcagaggcagaacgtaaagcaacactcgcactgaaagctattgctgatgctaaggctaaggctggagttgccgtagccgcccaatctgaagcagccgcagcagcagccgctgctgccaaggctagagctgatgctgaagccggagcaaacctagctgcagctgcaagagctgtggctgccgctgaggccgctgccagtcggcgaaatgaccgtcaagccggtattgcacaagcaggagcttctgcagctgcagagacaagggcattagcttcttccgccgctgccactgctaaagccgccgcttacgcgaatgccgatatccgtgcactaagtgctgcggctttagagtcctctatctcaagttcttcctcaacttccgcttctagcgcttcctcgtctgcttcctccggagccagtagtgactcctcatccggagcaagtagtggagcctcttctgactcttcctcgaattcctcttctgattcatctagtttgcttggtgatgatgcttccacaagcgcttcatccaccgcagaggccgaatcccgaacctcttctcttattcttaatggaggtacgtcttc

SEQ ID NO: 2381 - DNA, 993 bp, synthetic construct
  misc_feature 1..993: note = Description of Artificial Sequence: Synthetic polynucleotide
  source 1..993: mol_type = other DNA
gaagacttaaggtaaaagagctcgaagaagctctaacgccgaggcatctgctgccacttctacttcgtcacaagccgactcaggtaagaacaaggatgcctgcgcttctgacgccattgccggtgcagctgccagtgcttcttcccaagcatctatcctcggtaagagagcaagaagaagctctaatgcagaggccagtgctgcaacaagtacatcatctcaagctgactcaggtaaaaataaggatgcttgtgcatctgacgcaatagccggagctgctgcttcggcttcatcacaagctgattccggtaaaaacaaagacgcttgtgcctcggatgcaattgctggtgctgctgcctcggcttcatctcaagcctctagtttgggaaaaagagtcagacgttcttctaacgccgaagcatccgcagctacgtctacaagttcccaagctgactccggcaagaatacggatgcttctgcgagtgatgctattgttagtgtagccgcctccgtttcttcgcaggctgacagcggaaaaggtaagtccgcaggagaatccaatgcagaagcctctgcggccgcgtccgcgtcctctcaggctgactctggaaagggcaagagcgccagtgaatccaatgctgaagcctccgctgctgcatctacttcctctcaagcagatagaggtaaagacaaggatgctagtgcttcgaacgctgaggccagcgctattgcctctacttcgtctcaagctggaagtggtaagggcaaaagcacttctgaaagtaatgctgaaacgtccgctgctgcgtccgcttcttctcaagctaacacgggaaaagataagtcaacaagtgacagtaacgctgaagctagtgcagcagcttccgcttccagtcaggcagatagaggcaagggcaaagatgcttccgaaagtaatgcagcggcctgggctgcatctgcttcttcccaatctgataactcaggtacgtcttc

SEQ ID NO: 2382 - DNA, 501 bp, synthetic construct
  misc_feature 1..501: note = Description of Artificial Sequence: Synthetic polynucleotide
  source 1..501: mol_type = other DNA
gaagacttaaggtgcatcaaacgccgctgaatcttcctctctatgggaggattctagttcggaaaatactggagcttcgacagcagccgaaagttccagtctttgggaggattcctcctccgcctctgctagagcttccactgcagcaggaagtagttcagcttgggaggactcctctatcaccaatgctagagagtccggagcatctggatctctcagttcttgggaggattcgagttccgcttcagcaggcgcttcaaacgctgctgaatcgtcatcgttgtgggaggactcttcatctgaaaatacaggagctagtacagctgcagagtcctcatcactttgggaagattccagttctgcttccgcacgagccagcaccgccgctggtagttcttccgcttgggaggattcttctattactaatgcaagagaatctggagcaagtggctcgctgtcaagttgggaggatagttctagtgcatccgcaggtacgtcttc

SEQ ID NO: 2383 - DNA, 858 bp, synthetic construct
  misc_feature 1..858: note = Description of Artificial Sequence: Synthetic polynucleotide
  source 1..858: mol_type = other DNA
gaagacttaaggtatagcgattgagggagctttggttggtacaggtgcagcctctacagctgccgctagcgctgaaatgttatctgacacattgggtttgggtcaaagcgcccttcaagctcaaacggcatcagttactcaggccaatattgcttccgatgcatctaaccaggccaacagattggcagctgctgcagccgcagctatgagcgcggctgcctctgctcaggaaaatgccgcctccttggctagagcatccgcttctgctagtgagtctgccgccagcgcttcgtcaaaggcagaggcttctgccgaagccgctaaatcatccgcagagaaatgtttgctgctagcacaaaattcagcccaggctcaggcaagagctacagaacaaagcgaatcttcaaacagggattcagctgctaatgctgcagcagccgctgaagctgagagaaaagcaacactcgctttgaaggccattgctgatgctaaggctaaggccggagttgctgttgctgcgcaatctgaagccgctgcagcagcggcggctgccgctaaggctagagccgatgccgaagctggcgctaatctggcggctgcagctagggccgtggcggccgctgaggctgctgcctctagacgaaatgaccgtcaagctggcatagcacaagccggcgcttccgcagccgcagaaactagagcgctagcctcttctgctgctgccactgcaaaggccgctgcttatgcaaatgctgatatacgcgccttgtctgctgcggctctagagtcctctatttcatcttcttcctcgacttcggcatcctctgctagtagcagtgcatcttcaggtacgtcttc

SEQ ID NO: 2384 - DNA, 1086 bp, synthetic construct
  misc_feature 1..1086: note = Description of Artificial Sequence: Synthetic polynucleotide
  source 1..1086: mol_type = other DNA
gaagacttaaggttcatctagttcctccgccgagtcctctgcctcggccactgcatcatcggatgcaagttggtctgcctctagtagaagttcggctactggtagagcacctaatgttatcttgaaccgagccccacagctaggagctagcgctgctgctattgcgagtgcacgtgcatcaactagtgctaatgctgcatctgatgagaagtctgcccgtgaaacccgtgctactgccttggctagatccagagctgctgtaactgcagccgcaagggcagcagctaggacgcaggaggcagtagccgctgcgaaggcagccagcagagctcaagctcttgctgctgccaagtcgagcgcggctatctcggccttagctgccggtgaagccgcagcacaaaaggccgatgctgctgcgttggccgctttggctgctaatcaaagatcagtaaaagctgctgaaaacggattggctgtacagaacagagctaacggagaggctgagcaggcgtcaagagctgcagctgccaacttggctgcagctattagaactagagataatgctttggaaacaagaagggaagctgcaaggttaaaagctctagctaccgccgctgccaacgcaaataataaggctacttctctagctgaagcctctgcaaaccaggcagctgaggcctcctcagcggcggaggatacttcatctgctcaaagcgcagcagttgcccaagcggaagctgcagaaacattgaatgtgaatttggccattctagagtccacccaaagcagtcgtcaggactcaaatgttgcgaaggcggaggcctccgcagcagcaaaagcatcccctggaaccgccaccagagatggcgtaaacttgggactggcctccgacgctggcgctgctgcacaattgaaagcccaagccgctgcactggctagagctagctctagaatcagttctggtccagcactatctgcttggaaatggagaaatgaagattcctcagaatctagcacttccgctatcgcttcgtcgtccgcttctagttcgagttcatctagatctgcttcaggaggtacgtcttc

SEQ ID NO: 2385 - DNA, 1398 bp, synthetic construct
  misc_feature 1..1398: note = Description of Artificial Sequence: Synthetic polynucleotide
  source 1..1398: mol_type = other DNA
gaagacttaaggtgctgagagttcttcttccagtagtgcagcctcttctgcatcatcaagcagctccgagagtcgaggtcaacttttgcttcctttagaaagatccagcactagatcattgttagaccttgttagctctgcccgatccaacactgctataacagcttcaagcgctgctgccgccaaagctactttacgtgctatcaaggctgcaaattccgctcaaggtgaagctttagcacaagccactgccagtgctgcttcaaatgcaaaagcacgtgctactgccgcagctgcagctcaggcaacaaatgctgcggttaacgctcaaggtaaggccagcgcacaagcaatagctaccgctgaagcagctgaagctttgacgaaatccgcattacaagctcagagcgctgcttcctcatcgaaatctgaggctgctcaagcctccacgtcagccaatgcaggcgctggtgcattggccactgcttccgctcaggccttgtccgccaagaaggccgccctcgcttatgcttccgctgcagcagatgcttctaccgcagctgctaaagcaagagctgcagtggctgccgctgaagccgctacacgtaccgctgtccaagctgaaagagactccacaaacgctgcctcccttgcagctaaggcacaggccgaagccagagctgccgccgcagccgcagctgctgctagattagccgcttcagcagctgctgacgcttctgcccaagctgatgcaagggtccgtacagcttccattgaagctgccgcatcagcgcgtacgaaagcttccaatgcgcaggcgacagctgaggcggctgcaatcgctagatccagtagtagagacgctcaagctaactgggtggataataggtcctcagctagctcctcctcagccagcgcttctgcctcggtgtcagcttctgctagcggagaggcagattcagaggccgacagtgatgcttcagcctcagctagaagtgcagctgactccaatgccggctcaagttcaggtctggctgccgactctgctgcagacactgctgcaggatcaactgccggttctgcggctcgtttatctgccggatcagccgctggctccatagcgagaagcgcagctggttctactgctggctcatcaacaggcagtggtgctggagcatctgctgaaggctccagtaacgcatcttcgggcacttccgcaggagcttcatcaggtgctagtactggagcatccgctggagcttctgctaccgcgagtgccgataactcagctgataattctgctgaggcactttccagttcgtcagctgaaagctctagctcctcttggtcatcttcatctcaaaacatttggtcccaagactggggaggtacgtcttc

SEQ ID NO: 2386 - DNA, 1083 bp, synthetic construct
  misc_feature 1..1083: note = Description of Artificial Sequence: Synthetic polynucleotide
  source 1..1083: mol_type = other DNA
gaagacttaaggtccatcaaggttgtcggaaacttcggacagctcggccgcctcctggtcatctagttctagttcttcttccagtttgtcctcttctctcgcaagcgattctgcttcctcttcagcttctggatccgcaagtgcatccgctagtgcttctgcttcagcttccgcaagcagcagaaatgataactccagagtaaaggcatggaagaagggaaggggtggttccgatagcctggtcctatcatccgacagttccgaggatagtaaggctagagagcttttagaaactgacgcaggtttgggtgctgccgccgcgcttgcaagagctactgccgatgcacaggcacgaactgctgctagtgctgatgctactgctaacaaagctactgctaaggcattggttttagcagaagcagctgttagggctgaaaacgcggctattgtccgtatccgtagggctttgtctgctgctcaagcactcgtctccgctagcaatcgagccaaagccgccgcaagggcagcaagagaagctgcagctaacagtgctgcagccgccgctaaagcctctaccaatcaagtcaaagcaaacgcagacagtttggtagccaacagagctgctgctgctttactggctgcagccgaagaagcactgcagaaggcttctgcgtcccagaacgcagccgcagaggctgctgcgaaagctagagccgctgctaatgcgaatgcagctactacacgagccgctgcttcggccatcttggccgaggcccgtgcacgtactgctataacgaaggcattagctgctcaatctacggcttccgcacaagcatccagcgcctctcaagtccaaaacagagctaacaatttgcaagctgagactgctagcttggctcaatcaagagccgaggccgctatcgcggcagcagccgctcaggctgcagctcttgctgaagcaaatgctcagttggcaagattgagtaaggcttcagcaggagcttctagtgagggttctgctagtgcatcggcctcagcatctgccagtgcttcatcctcctcctcttcagcaggtacgtcttc

SEQ ID NO: 2387 - DNA, 993 bp, synthetic construct
  misc_feature 1..993: note = Description of Artificial Sequence: Synthetic polynucleotide
  source 1..993: mol_type = other DNA
gaagacttaaggtgctcgtgaagaagtggagactagagacaagactaagacatctaccgttgttaaaagtgaaaaggttgaagtagttgctcccgctaaagatgaattgaaacttacttccgaacctatctttggacgtagagtcggaaccggtgcttccgaagtagcctcgtcctctggagaggctatcgctatatctcttggagctggacagtctgctgcagaatcacaagcgttagctgcctcacagtcaaagaccgcagccaacgccgcaatcggtgcttctgaacttactaacaaggtagcagccttagtcgctggtgctactggtgctcaggctcgtgccactgctgctagctcctctgccttgaaagcttccttggctactgaagaagctgccgaggaggctgaagccgctgttgccgatgccaaagccgccgctgaaaaggctgagtcactagctaaaaacctagcttcggcctcagctagagccgctctcagttcagagagagctaatgaacttgcccaagctgaatccgcagcagctgcggaggcccaagccaagactgccgctgctgcaaaggcagccgaaattgccttaaaggtggctgagattgctgtaaaggctgaggcggatgccgcagccgctgccgtggctgctgctaaagccagagccgttgcggacgccgctgctgccagagcagcagccgttaacgctattgccaaggccgaagaggaggcttctgctcaggcagagaacgctgcaggcgtcttacaagccgctgcctccgctgctgctgaatcccgtgctgccgccgctgcagctgctgccacttctgaggcagctgctgaagcaggtccacttgctggcgagatgaagcctccgcactggaaatgggagagaattccagtcaaaaaagaggagtggaaaacttcaactaaggaggaatggaaaaccactaacgaagagtgggaagttaaaggtacgtcttc

SEQ ID NO: 2388 - DNA, 894 bp, synthetic construct
  misc_feature 1..894: note = Description of Artificial Sequence: Synthetic polynucleotide
  source 1..894: mol_type = other DNA
gaagacttaaggtagagtcataaatcacgaatcccttaaaacgtctgaagatattcaaggtggttattctgctggaattgtaggtgatggttcggacgccctgggtagttctattgagaatgctcaaaaggtggcacgtgccgctgaaaacgtaggcttgaatcttgaactgggtgctggtgcgcgtgccgccagcgttgccgccgcggctcaggcaaagaatacggaagctgctgaagctggtgctaacgcggcgcttgctgccgccattgcaaaacgtgaagaagctattaaggcctctgagatagcgaatcagttattgactaacgcagctaaggccgccgaggctacagtaagtgcaactaaacgcgctgctcaattaactgcagctgcaaaggaggctacccgtgcctcagctgctgccgcagaggcagctactgaggcacaagttaaagctaatgctgattcgatcatcactaaacgtgcagcaatcgcagaggctcaagccgcggcagaggcccaagtgaaagccgcgatcgctagaaagtccgccgctaactttcttgctaaagcacaaattgcagcagctgctgagtccgaggcaaccaagttggctgcagaggctgtcgttgcccttacaaatgccgaggttgctgtcaatcaggcccggaatgctcaagcaaacgcgagtactcaggctagtatggccgtgagagttgactcccaggctgcaaacgcggaggccgcagcggtagctcaagccgaaactcttttggttactgctgaggcggtagccgcagccgaagctgaagtggccaacaaagctgcaacctttgccaagcagatagtaaacgaaaagaagattcatgttgccaaattagaaggtacgtcttc

SEQ ID NO: 2389 - DNA, 972 bp, synthetic construct
  misc_feature 1..972: note = Description of Artificial Sequence: Synthetic polynucleotide
  source 1..972: mol_type = other DNA
gaagacttaaggtgtagaggagtttaaaagctctgcaactgaggaagtcatttcaaagaacttggaagtggatcttctgaagaatgttgatacatccgctaagagacgcgagaacggtgctcctgttttgggaaaaaataccctccaatctttggagaagattaagacatctgcctcagtgaacgcaaaggctgccgcagttgtgaaggcctcggcgttagctcttgctgaggcttatctgcgggcatcagccctgagcgctgctgcttcagccaaggccgctgccgctctgaaaaatgctcagcaagctcaattaaatgctcaagagaagtctttggcagccctgaaagcacaaagtgaagaagaggctgcctccgctagagccaatgctgcaacagcagccacccaaagcgccttggaaagggcacaagcttcttcccgtttggcaactgtagctcaaaacgtggccagtgatcttcagaaaagaacctctaccaaggctgctgctgaagctgcggccactttgagacaactgcaagatgccgaaagaactaagtggagtgccaacgcagctcttgaagtttctgccgctgctgctgccgctgaaaccaagaccactgccagttcggaagcagctaacgcagcagctaaaaaagctgctgctatcgcctccgatgcagatggtgcggaaagatccgcctctacagaggctcagtccgctgctaaaattgagtctgtcgccgccgcagagggtagcgctaatagtgcttctgaggactccagagctgcccagttagaggcttccaccgctgctagagcaaatgttgctgcagcagttggtgacggagctataattggactgggtgaggaggccggagctgctgctcaacttttagcacaggctaaagcattggctgaagtctctagcaaatcagagaacattgaggataagaaattctcaggtacgtcttc

SEQ ID NO: 2390 - DNA, 966 bp, synthetic construct
  misc_feature 1..966: note = Description of Artificial Sequence: Synthetic polynucleotide
  source 1..966: mol_type = other DNA
gaagacttaaggtctggaaggaccaggaaacagtctcccagaattggtcaaaggatccgcctccgcaacagccagtaccgctgtaactgctagatctggtttgcgtgctggccaggtggcccttgcctcacaaaaagatgctgttttacaagcccaggctgcagcctcagctgcaagtgaagctcgcgccgcagccgatttgactgccaagcttagtcaggagagcgcttctgtccaatcgcaagctgcagctaagggaaaagaaaccgaagaagctgctgttggacaggctcgcgctggtcttgaatccgttagcatggctgcttccgcaacctcggccgctaaggaagctagtactgctgctaaggcggcagctagcgctttgtcaactgccgtcgtgcaagctaaaatagctgagcgagctgcgaaggctgaggcggttgcttcagatgaagcaaaggctaaggccatagctgccgccaacctcgctgcagaggcctcagttgcagcggaagccgctttaaaagctgagaaagttgctgaagaagctatcgccagagcagccagcgctaaggcagctgcacgagcagctgctgcagctttggcttctagtaaggaggctgccacagcttcagctagaaacgccgctgaaagtgaggctcgtaatgaagttgctgtattgattgcggagatcgacaaaaaatctcgtgaaatcgatgctgcttctagtttgaacgctagagcagccgctaaagcctcaagtagaaatgtcgagactgctactatcggagcaaatattaattcttcaaagcaagtggtttccatcccggttgagataaaaaaattttcagaacctgaggtttctacgtcttggagagaagatgaagaggtgaccaaggagaaaaaggagcacattaatttgaatgattttgatcttaaatctaatgtgttctcaggtacgtcttc

SEQ ID NO: 2391 - DNA, 693 bp, synthetic construct
  misc_feature 1..693: note = Description of Artificial Sequence: Synthetic polynucleotide
  source 1..693: mol_type = other DNA
gaagacttaaggtgctaacgccaattctgactccaactccaattctaattctaatgctaactccgacgcaaacagtaactcttactccaactcgggagctaatgccaactcgaactccaattcgaattcgaatagcaacgcgaattctgatgcaaactctaactcgtattcaaacagcggtgccaatgctaattcaaattctaattcaaactcaaatagcaacgcttattccgacgccaactctaattcctattctaattcgggtgcaaacgctaattcttactctaacagtaacagtaactctaatgcaaattctgacgctaactcaaatagttactcaaatagtggtgctaacggaaacagtaattccaactctaactcaaactctaatgctaatagcgacgccaatagtaacagttacagtaattccggatccaacgccgactccaacgccaatagtgactcaaatagtaacgctaacagtgatgcaaactccaattcttatagcaatagtggagcctacgcaaattcaaacgctaattcaaattcaaatagtaacgcgaactctgacgcgaactctaattcatattcaaattcgggtgctaacgctaattcgaacagtaactccaactctaattcaaatgctaattccgacgctaactctaactcctactccaattcaggtacgtcttc

SEQ ID NO: 2392 - DNA, 723 bp, synthetic construct
  misc_feature 1..723: note = Description of Artificial Sequence: Synthetic polynucleotide
  source 1..723: mol_type = other DNA
gaagacttaaggtgacggcagtggtagcggaagtggatcaggatcaggtagtggtagtggatctggatccggctcgggaagtggatcaggttctggtagtggaagcgattcaggatcgggatccggaagtggccatggttcctctagttcttcgtctagcggagatggatcaggtagtggttctggttccggatctggatcaggatccggttctggttccggaagtggttcaggttctggttcaggaagtggtagtggatccggtcacggatcgagttccagttcttcatcaggtgatggtagcggtagtggatccggtagtggcagcggatcaggttcaggttctggatccggctctggatccggatccggtagcgactctggttcaggctctggttcaggtcatggctcttcatcaagttcatcttcaggtgacggatctggttccggttcaggatctggatcaggttccggttcgggatctggaagtggcagcggctccggatccggatctggatccggatctggttctggacacggctcctcatctagtagctcatcaggagacggcagtggttcaggatctggcagcggcagcggatcaggaagtggttctggttcgggtagtggaagcggctcaggaagtggttcgggatccgattctggctcgggatcaggttctggtaacggctctagcagttcgagtagttcaggtacgtcttc

SEQ ID NO: 2393 - DNA, 567 bp, synthetic construct
  misc_feature 1..567: note = Description of Artificial Sequence: Synthetic polynucleotide
  source 1..567: mol_type = other DNA
gaagacttaaggtaataatttaaatgcccaaaatatggctgcaggttctaatactcagataactgctggtaatgttataggttcagctatccagaacacagcggctggattggctgcttcagcaaacattatcaacaacggtgtaaacagaattgttactaattcaaacactaagggattagttaatactatcagcaggattaataacttgaacggaagaaacaacggagcattgggtttgaacggaaacaacttacagggccaggttcctttggtaaatggtgtgaaccaggccgtcaccaactcgaacacgcagggattggtcaacactatttcacaaatcaacaaccttaacggtggaaacaacggtgccttaggtgttaatggtaataatctgcagggtcaggttccattggtcaacggtgttaaccaggctgttactaacagtaacacccaaggtttggtcaacaccatctctcagattaacaatcttaatggaggaaacaacggcgctctgggtgtaaatggtaacaatctacagggccaagttcctttaggtacgtcttc

SEQ ID NO: 2394 - DNA, 561 bp, synthetic construct
  misc_feature 1..561: note = Description of Artificial Sequence: Synthetic polynucleotide
  source 1..561: mol_type = other DNA
gaagacttaaggtaacaatcttaacgcccagaatatggctgctggatccaatacgcagattacggcaggaaacgtaataggcagtgccatccagaacaccgcagccggtttagctgcatctgctaatatcattaataacggcgtcaatcgaattgttactaatagcaatactaaaggtctggtgaatactatttcacggatcaataaccttaatggtaggaacaacggcgcccttggattgaacggtaacaacctacaaggacaggtccctcttgtcaacggagttaatcaagctgtgaccaacagtaatacacagggtttagtaaacactatttctcaaattaacaatttgaatggtggcaataacggagcattgggagtcaatggtaacaatttgcaaggccagttgccactcgttaacggtgtgaaccaggccgtgactaattcaaacacccagggagtggtaaacacaaatagtcaaatatcgaacctcaatggagctaacaacgttgcattgggtgttaatggaaataacttgcaagaagccctaggtacgtcttc

SEQ ID NO: 2395 - DNA, 567 bp, synthetic construct
  misc_feature 1..567: note = Description of Artificial Sequence: Synthetic polynucleotide
  source 1..567: mol_type = other DNA
gaagacttaaggtaatagcttgaacgctcaaaacatggctgccggctctaacacacagattacagccggcaacgtaattggttccgcaatacaaaatactgctgccggactggcagcctcagctaacattatcaataacggtgtcaatagaatcgttaccaattccaatacgaagggtttggttaatacaatctctagaataaacaaccttaacggcggtaataacggtgccgttggactaaacggcaacaacctacaaggccaggttcctctggtcaatggtgtaaaccaagcagtaaccaactctaacactcaaggattagttaatactatctcccaaatcaacaacttgaacggaggaaataatggcgccctcggtgttaatggtaataatttacagggtcaagtgcctctcgtgaacggtgtgaaccaagccgttacgaattcaaacacccaaggactagttaatacaattagtcagatcaacaagttgaatggtggcaacaacggagctttgggtgtgaacgttaacaatctccaaggtcaagtccctctaggtacgtcttc

SEQ ID NO: 2396 - DNA, 1239 bp, synthetic construct
  misc_feature 1..1239: note = Description of Artificial Sequence: Synthetic polynucleotide
  source 1..1239: mol_type = other DNA
gaagacttaaggtagaccatcgggagacgacgacgtccgaattatttcttcgaccaaggacgttacttctactggaaagagaagatcaaactctaagaacaatgtcgctcaatcttcctctcaaaaggacagtatccgggtaaaggactcaaatgaagtcattaaatccatctccgaaaatgatcctgacggtacgcgtattactacctcaaagggtacaggagtcggttctgaaacattgaatgaaaatttggttgagttgaatcaaaatacagtatcagacaccaactctgtcgaaacttcctccgataaatctaacagtgtgactacttacgacgctgatgatagaccgctgaccgtcaccgacagaaaaggccaaaaggatgtgaagtccgccactaatgctaaggaagatagttcggaagtgtcagaaaattctgaatctgaaaccaattggcaatcagagtctgactctgttgaaaagtcggtatcacatccagtttgcggaggagctgagtccccatcgagtggtggaccacagggatctggccctcaaggtggaggttcccaaggtggaccatcaggtcagggacaacctaacggcggcatagctgtttcaagcgctgaggacgccgccgccccacagtcaactcgtacgtcaactgcagagggtgaatcgtcgtcctttagtgctgccgcagatgttaatgaaggttctagaaagggcaatgtagctctggctggaagtaccgcttacggtcgttcggtcaccaatgaaaactcctcttctggttctacacaaagtttttcaggtgccgcagaagaaaacgtcgcttcacctgacggtggtagtacccaaagaaatgctgctatcgctggtaatattgcagagggacaagtctcttcaaaagaagaggtggccgaaggtaaggctacctctttatcaggtactatccaagaaagtgacgaaaactcacaacgtagcgccgctattgccggttcctcggccgaagctaacgttgctacacgagagcagacctctaaaggtaagacagccgcttggactggaaactctcaagaaaagtctacttcgccagcagagatttcagagactaacattttctcctctggttcctatgctgagggatctactttatcaagagaaaagttggaacagggtaaatctacaacatggtccgaagaatctgaagagtcccgtaaacacggaggtacgtcttc

SEQ ID NO: 2397 - DNA, 591 bp, synthetic construct
  misc_feature 1..591: note = Description of Artificial Sequence: Synthetic polynucleotide
  source 1..591: mol_type = other DNA
gaagacttaaggtgcagttgccggtggtgttgctggagcttcgtcgaaggcctccggtaacgaaggtagtggtgctgcttccggtgctaaaaccgtttctgtagcaggcacggacggttccggtggtgccttggctggttcagctgccggagctatttcgaaggcttcaggtgacgaaggttcaggagcagcatccggagctaagaccgtatcggtcgctggtaccgatggcagtgaaggagccgtagccgtaggtgttgcaggagcctcgtccaaagcttccggaaacgaaggttcgggagcagcttctggcgcaaaaactgtgagtgttgccggtaccgatggttctggaggagcccatgccggctctgccgctggagcttcttcaaaagcttccggagacgagggtagcggtgctgcctccggtgcaaagacagtatccgtggctggtactgatggttcaggaggtgctcttgctggcggcgctgccggtgcttctagcgaggcgtcgggtgatgaaggatcaggcgcagcatctggagcaaaagctgtttctgtagctggaacagatggctccggaggtacgtcttc

SEQ ID NO: 2398 - DNA, 444 bp, synthetic construct
  misc_feature 1..444: note = Description of Artificial Sequence: Synthetic polynucleotide
  source 1..444: mol_type = other DNA
gaagacttaaggttctagcggaagaggattgggtggatacgatggttcggtcgacggaggatacggttccggcagtggttccgccgctgcagcagccgccgccgctgccgcaggatcctctggtcgtggtattggtggatatgacggattcgtagatggaggatatggttcaggaagtggatcggcggcagcagcagcagctgcagctgccgcagcagcaggatccagcggaacaggtttcggcggatatgatggttttggcgacggtggatacggttctggctcaagtgccgcggcggctgctgcagctgctgccgcagccgctggttcttcaggaagaggtttgggaggatatgatggttgggtagatgacggttacggttccggatcgggatctgccgcagcagctgccgctgccgcagctgccgctgcaggtacgtcttc

SEQ ID NO: 2399 - DNA, 447 bp, synthetic construct
  misc_feature 1..447: note = Description of Artificial Sequence: Synthetic polynucleotide
  source 1..447: mol_type = other DNA
gaagacttaaggtaataatctgcatcatcatgatgaatacgttgacaaccatggtcagttggtcgagagatttactactaggaagcattatgaacgtaatgctgctactcgtccacacctttctggaaacgaaagactcgtcgagactatcgttttagaagaggacccatacggccacgaggatatttacgaggaggacgtagttataaacagagttcccggagcttcatcatcagctgcagcagcctcctctgcttccgctggttctggacaaactattattgtggaaagacaggcaagccacggagctggaggtgcggctggtgctgccgctggagctgcggccggttcctctgccagaggtggaagtggtttttatgagactcacgattcttactcctcctacggatcgggctcatcaagcgctgccgccgcaggtacgtcttc

SEQ ID NO: 2400 - DNA, 423 bp, synthetic construct
  misc_feature 1..423: note = Description of Artificial Sequence: Synthetic polynucleotide
  source 1..423: mol_type = other DNA
gaagacttaaggtagcggtgctggaggtgtgggtggtggatatggtggtggtgacggaggctatggatcgggctcatccgcagctgctgccgccgcagctgccgctgcggctgctagcagacgtgctggtcacgaccgtgcatacggtgcgggttccgctgccgccgctgcagctgcagccgcagctggtgcaggagcttctaggccagtaggtatctatggtaccgatgatggattcgttctggatggaggatatgactcggaaggctctgcagctgcagctgctgctgctgcagccgctgctgcatcatcatctggcagatctaccgaaggacaccctttactttcaatttgttgtcgtccatgctcacatagacatagctacgaggccagcagaatcagtgtacacggaggtacgtcttc

SEQ ID NO: 2401 - DNA, 579 bp, synthetic construct
  misc_feature 1..579: note = Description of Artificial Sequence: Synthetic polynucleotide
  source 1..579: mol_type = other DNA
gaagacttaaggttctggagctggtagagctggtggtgattacggatggggcgacggtggttatggatcggattcggctgcagcggccgctgcggctgcagctgccgcatctggagctggcggaagcggtggcggatacggttggggcgacggtggatatggatccgattcagctgctgctgctgctgcggccgccgctgctgcatccggagcaggaggctctggaggaggatatggttggggagatggaggatacggttccgactccgccgctgcagccgcagcagcagcagcagctgctgcaggaagtggagcaggaggtagaggtgatggcggatatggaagtggctcttctgccgcagctgcagcagccgcagcggccgcagccgctgcaagacaagctggtcatgagagggccgctggtagcgctgcagctgcagcagctgccgccgcagcagctgccgcttctggtgctggaggtagcggacgtggttacggctggggtgacggcggttatggatccgactctgctgcagctgctgctgccgcagctgctgccgctgccgcaggtacgtcttc

SEQ ID NO: 2402 - DNA, 480 bp, synthetic construct
  misc_feature 1..480: note = Description of Artificial Sequence: Synthetic polynucleotide
  source 1..480: mol_type = other DNA
gaagacttaaggttctggtgctggtggcgcaggaggtgattacggatggggagatggaggatatggaagtgattcagccgcagccgccgccgctgctgcagcagccgcatcaggtgctggaggagccggaggtggatacggatggggagacggtggttatggatctgactccgcggcagccgcagcagctgcagcagctgcagctgccggctccggcgctggaggtaggggtgatggaggttacggatcaggatctagtgcggcggctgcggccgctgcagccgctgccgctgccagaagagcaggacatgaccgtgcagcaggtagcgcagctgccgctgctgctgcagctgctgccgctgctgcatctggagctggcggttcaggaggcggatatggttggggagacggaggttacggtagtgattccgctgccgccgctgctgccgctgcggcagctgctgctgcaggtacgtcttc

SEQ ID NO: 2403 - DNA, 1062 bp, synthetic construct
  misc_feature 1..1062: note = Description of Artificial Sequence: Synthetic polynucleotide
  source 1..1062: mol_type = other DNA
gaagacttaaggtagtggagcaggaggtgttggaggcggttacggatggggagatggaggttacggctccgattcagctgctgctgccgccgctgccgctgccgcagctgctgcttcaggtgccggaggtgctggaggatacggtggttatggatcggactcagctgccgcggctgctgctgcagcagccgccgcagctgcttcttcaggtgctggaggcgcgggtggaggttatggatggggagacggtggatacggttcagactctgccgctgcagcggccgccgcagcagctgcagctgcaggttctggtgctggtggaagaggtgatggaggatatggatctggtagtagtgccgcagccgctgctgcagcagcggctgcagctgccgcttctggtgcaggaggttcaggtggtggttacggctggggagatggaggatatggtagtggatctgctgctgcagctgctgcggcagccgcagccgccgcagctggatctggtgcgggcggagtcggtggaggctacggttggggagacggaggatatggtagtgactccgctgccgctgctgcggcagctgcagctgccgctgccgcatctggagcaggaggtgccggtggctacggcggatacggaagtgattccgctgcggctgcagctgcggccgctgctgccgctgctgctggttccggtgctggtggagcaggaggtggttacggatggggtgatggtggttacggttcagatagcgctgccgcagcggccgcagctgctgcggctgccgcagcttccggagctggaggacgaggtgacggaggatacggaagtggaagttctgccgctgctgctgccgcagctgccgcagcagccgctcgacgtgcaggctatgatagggccgcaggaagtgccgccgctgcagctgctgcagctgcagccgccgccgctagtggtgctggcggttcaggcggaggatatggctggggagatggtggctacggatctgattcagctgcagctgctgccgcagccgccgcagccgctgcggcaggtacgtcttc

SEQ ID NO: 2404 - DNA, 774 bp, synthetic construct
  misc_feature 1..774: note = Description of Artificial Sequence: Synthetic polynucleotide
  source 1..774: mol_type = other DNA
gaagacttaaggttccggtgctggaggtgtgggaggaggttacggctggggagacggtggctacggatctgattcagcggccgctgctgcagccgccgcagcagccgctagtggtgctggaggtagcggcggttatggtggttatggttcagactcagccgctgccgcagcagccgccgctgctgctgctgccgctggtagtggagctggtggtgttggaggaggttatggttggggtgatggcggatatggatctgatagtgcagctgccgcagccgccgcggcagctgcagcttcaggagctggtggttctggaggatatggaggatatggtagtgactccgctgccgccgccgctgctgcagctgctgcagcagcggctggatcaggcgctggtggagttggtggaggttacggttggggtgatggtggttacggcggatacggatcagattctgctgctgcagccgcagcggctgccgctgctgctggttccggtgcgggaggtgttggtggaggctatggcagaggagactctggttacggctccggctcttccgcagcagctgctgccgctgctgccgctgcggccagaagagcaggacatggtagatcctcaggctcagctgccgccgcagccgcagctgctgcagctgcagcagcttcaggagcaggcggttcaggtggtggatatggctgggattatggatcttatggctcggactcggccgccgccgcagctgctgctgcggctgcagctgcaggtacgtcttc

SEQ ID NO: 2405 - DNA, 522 bp, synthetic construct
  misc_feature 1..522: note = Description of Artificial Sequence: Synthetic polynucleotide
  source 1..522: mol_type = other DNA
gaagacttaaggtaaaaaccttagacatcatgatgagtacgtcgataaccacggtcaattggttgagagattcacgacaagaaaacatttcgaacgtaacgcagcaactagacctcacttgtccggtaatgagagactagttgaaaccattgttttggaagaagatccatatggacacgaagatatttatgaggaagatgtcgttatcaaaagagttccaggtgcctcaagttcagctgccgctgcttctagcgcttctgctggatcgggtcaaactattatcgtagaacgccaggcatctcatggagcgggtggtgctgctggagctgcagctggtgctgccgctggttcatccgcaaggaggggaggtggtttttacgagactcacaattcttactcctcttacggttctggttcatcatccgctgctgcaggatcaggagcgggaggtgtcggcggtggttatggtagtgacagtgctgccgccgccgctgctgctgcagctgctgcaggtacgtcttc

SEQ ID NO: 2406 - DNA, 423 bp, synthetic construct
  misc_feature 1..423: note = Description of Artificial Sequence: Synthetic polynucleotide
  source 1..423: mol_type = other DNA
gaagacttaaggttctggcgctggaggatctggaggtggttatggttggggagacggaggttacggaagtggatcctcggctgccgctgccgccgctgcagctgcagccgcaggatctagaagatccggtcacgatagggcctacggagctggatccgccgcagccgcagcagcagccgctgctgccggtgcaggagcatcaagacaagtgggtatttacggaaccgacgacggtttcgtccttgatggaggatatgattctgagggatctgctgctgcggccgcagcagctgctgcagcagccgcttcgagttctggtcgttcaaccgagggacatccattgctgagtatctgttgccgaccatgttcccattcacactcatatgaagcatcaaggatctctgtgcatggaggtacgtcttc

SEQ ID NO: 2407 - DNA, 579 bp, synthetic construct
  misc_feature 1..579: note = Description of Artificial Sequence: Synthetic polynucleotide
  source 1..579: mol_type = other DNA
gaagacttaaggttcaggagctggaggcgcaggcggtggatacggatggggtgattcaggttatggatctgactcagcagccgcagctgcagcagcggccgcagccgctgccgcctcaggtgctggtggatccggaggctatggtggatatggttccgactcagctgccgccgctgcagcagcggcagcagccgcagccgcaggcgcgggagcgggcggagctggaggatcctacggctggggagatggcggatatggatcggattcggcagccgcagcagctgcagcagcagcagccgcagcaggttctggtgcaggaggaagaggtgatggtggttatggatcaggtagttcagctgctgcagcagctgccgctgccgccgcctctgccgccaggcgcgctggacacgatagcgcagccggctctgctgctgctgcggccgctgcagcagctgcagctgccgcttctggtgccggtggttctggtggtggatatggttggggagacggaggatacggttccgactcggcggcagcggcagctgcagcagctgctgctgccgctgcaggtacgtcttc

SEQ ID NO: 2408 - DNA, 579 bp, synthetic construct
  misc_feature 1..579: note = Description of Artificial Sequence: Synthetic polynucleotide
  source 1..579: mol_type = other DNA
gaagacttaaggtagtggagccggaggtgccggaggaggttatggctggggtgatggtggatatggttcagacagtgcagctgccgcagccgcagccgctgccgctgctgctgcttccggagctagaggtagcggaggttacggtggttacggatcggatagcgctgctgctgctgcagctgcagcagcagcagcagccgctggaagtggtgctggtggtgttggaggtggttatggttggggagatggtggttacggatctgatagtgcagctgccgctgcagcagccgccgccgctgcggccggaagcggtgccggcggaaggggtgacggaggatacggttccggatctagtgctgcagcagccgctgcagctgctgctgctgccgcgagaagagctggtcatgaccgggccgcaggttcagcagctgctgccgcggctgcagcagctgccgccgcagcttctggcgctggtggatcaggtggtggatatggatggggagatggaggatacggtagcgattctgcagctgctgcggcggctgctgctgctgcggctgcagcagcaggtacgtcttc

SEQ ID NO: 2409 - DNA, 768 bp, synthetic construct
  misc_feature 1..768: note = Description of Artificial Sequence: Synthetic polynucleotide
  source 1..768: mol_type = other DNA
gaagacttaaggtagcggtgctggtggacgcggcgacggaggttacggttggggagatggtggatatggttcagattctggtgcagctgctgccgctgcagctgccgctgcggcagctgcatctggtgcaggcggaagaggtgatggaggttatggtagaggtgacggaggatatggaagtgatagtgctgctgcagcagcagccgcagcagcagccgcggcaggatctggagcaggaggtcaggcaacggttgttatggacggtgctatggccgcaatggttttaactagagcccaacaacaattagcggctgcagccgcagctgcttcagccagtggagctggtggatctggcggaagttatgaatgggattacggaagttacggatcagattccgcagccgcagcagcggctgccgccgctgccgctgctgccggttctggtgctggcggtgtgggtggtggatatggtcgtggtgatggtggctatggctctgatagtgctgccgcagccgcagctgcagccgccgcggcagcaggatccggtgctggaggaagaggagatggtggttatggatggggagatggcggctacggctctgattctggtgctgcagcagctgcagcagcagctgctgctgctgcagccagcggtgcgggaggcagaggcgacggtggttacggatggggagacggaggatacggatccgaccctggagctgccgctgctgctgcagctgctgctgccgccgctgcaggtacgtcttc

SEQ ID NO: 2410 - DNA, 399 bp, synthetic construct
  misc_feature 1..399: note = Description of Artificial Sequence: Synthetic polynucleotide
  source 1..399: mol_type = other DNA
gaagacttaaggtaagacacttaaccatattggactacatcctaaaggcaacacgcgtattgatgagtatgtggataaaacaggtcagctgtatgaaagatacacgaccagagaagagttcgaaaggaacgccgctactttaccacacttgtcccgcaacgaaagattgttggaaacgatcatcatcgaggaagatccatcaggtcatgagaaaatatataaagaggatgtcgttcttaaacgtgttcctggagcttcttctgccgcttctgctagtagcgctgccgccgctggttctggttccagaagattaggcaggttgcatggatgggatggcggtgcttacggctccgattcagctgctgcggctgccgctgcagctgccgcaggtacgtcttc

SEQ ID NO: 2411 - DNA, 633 bp, synthetic construct
  misc_feature 1..633: note = Description of Artificial Sequence: Synthetic polynucleotide
  source 1..633: mol_type = other DNA
gaagacttaaggttccggagctggtggcttaggcggtctgtacggattacacggaggatattacggatcagactctgcagcagctgccgcagccgctgccgctgcagcagccggatccggagctggtggtcttggaggactctacggtttgcatggaggagtttatggttccgacagcgctgctgctgctgctgcagccgccgccgcaacagctggttctggtgcggaaggattaggaggtctgtacggactccacggaggatattatggtagtgactctggagctgcagcggccgctgcagctgcagcagctgctggtagtggtgctggtggtttgggaggacattatggactgcacggaggcgtgtatggttctgacagtgcagctgctgcggccgcagccgcggccgcagctgcaggttccggtgctggtggtttaggaggattgtatggtctacacggaggagtttatggatcctccagttcgcgtagagactcttcttccgctagctctgctgccgccgccgctgcggctgccgcaggaagctccgccgcatctagcgaaagagtctacgaatccgagtcagcagcagcagcagctgccgcggcagcggcagctgcaggtacgtcttc

SEQ ID NO: 2412 - DNA, 735 bp, synthetic construct
  misc_feature 1..735: note = Description of Artificial Sequence: Synthetic polynucleotide
  source 1..735: mol_type = other DNA
gaagacttaaggtagcggctcaagaggtctgggtggactctacggttgggatggtggagtctacggttccgacagcgccgccgcggcggccgctgccgccgctgctgccgctggatctggtgtttctggtttaggtggtttgtacggatgggatggtggagtgtacggtagtgattccgcagctgcagccgctgcagcagccgccgcagctgccggttccggatctcgtggcttgggaggattatacggatggaatggtggtgtctatggatcagattctgccgcagccgcggctgcagctgccgctgcagcggcaggttctggcgtctctggacttggtggactttatggatgggataggggagtgtacggttctgacagcgctgctgcggctgctgccgcagctgccgccgctgccggctcaggttcaagaggattaggtggattatacggttggaacggtggcgtctatggatccgattctgctgctgccgctgccgccgccgcagcggctgctgcaggctctggtgttagcggattgggaggtctgtatggatgggacggtggtttatacggtagcgattcggctgccgcagccgctgcagccgctgctgcagctgcaggtagtggagtatcaggactaggaggcttgtacggatgggacggcggtttatacggaagtgatagtgcagccgcagcagctgctgctgcagcagcagcagcaggtacgtcttc

SEQ ID NO: 2413 - DNA, 735 bp, synthetic construct
  misc_feature 1..735: note = Description of Artificial Sequence: Synthetic polynucleotide
  source 1..735: mol_type = other DNA
gaagacttaaggttctggagctggaggtctaggaggtctatacggttatcatggtggtgtctatggatcagatagtgctgccgctgccgcggccgccgcagcagctgccgctggttcaggtatttcaggattgggtggtctttacggatgggatggaggcctctatggttcggatagcgctgccgccgctgctgctgccgcggcagccgcagcaggttctggctctagaggattaggtggcctatacggatgggatggtggcgtgtacggatctgatagtgccgctgcagcggccgctgctgcggcagctgccgctggatccggatctcgtggactgggtggcctctatggttgggacggaggagtttatggatccgattctgcggcggcagccgctgcagcggctgctgctgcagcaggatcgggagtctctggactcggtggcctttatggatgggatggaggactgtatggatccgattcctcggccgcagctgcagcggcagctgccgccgctgccggttcaggctctaggagattgggcggattgtatggatgggatggtggagtttacggctctgattctgcagctgcagctgctgctgctgccgcagcagctgcaggttccggtgtaggtggactgggaggattatacggttgggatggaggagtttatggtagcgattctgctgcagctgccgcggcagcagccgccgctgccgcaggtacgtcttc

SEQ ID NO: 2414 - DNA, 429 bp, synthetic construct
  misc_feature 1..429: note = Description of Artificial Sequence: Synthetic polynucleotide
  source 1..429: mol_type = other DNA
gaagacttaaggtcaatacattgacgatgacatttaccgtctgaagcgtacttacggcgaaacttctaatactcgttccgatgaatacgacgttgacaagttcggaagattatatgagcgaacaaccactcgtaagaagttcgaaggtaactcaaaagtatctccttacattagtggagatgagaaggttgtggaaactattgtttatgaaaacaacccagtcggtcgaggaactatctatgaagaggacgtcgttatcaaaaaggtacctgacgaaacgtctattggaacagctgcttcttcagcatctgctggtgctggactcggcatagctccaacaatcatcgttgaacgtcctttcgaaaattacggtggcggtgctgctgccggtgcagccgctgcagctgccgcagcagcaggtacgtcttc

SEQ ID NO: 2415 - DNA, 573 bp, synthetic construct
  misc_feature 1..573: note = Description of Artificial Sequence: Synthetic polynucleotide
  source 1..573: mol_type = other DNA
gaagacttaaggttcgtctggtgttggttacgaaaggggatacggttctgactctgctgctgcggcagccgctgctgcagcggccgccgcggctggatctggatctagaggtcttggaggttactacggagatggattgttggatggaggctacggtagtggatccgccgctgccgcggccgccgcagctgctgcagctgctgattccggtagtagaggtttaggcggatattatggagacggcctgctagacggagaatatggatcaggctcagctgcagccgctgccgctgccgctgctgccgctgcaggatcgtcaggagtaggttatggtcgtcgttatggaagcgattctgctgccgctgctgcagcagctgctgctgcagcagcaggttcatcaagcgactacacagtgtatgaaagctctagacggggatccagctcttcagccgcagccgcagccgccgccgccgcagccgcaggttcaagcgaagctggttacgaaagaggttacgaatcggattcagctgctgcggcggctgccgccgcagcagctgccgcaggtacgtcttc

SEQ ID NO: 2416 - DNA, 807 bp, synthetic construct
  misc_feature 1..807: note = Description of Artificial Sequence: Synthetic polynucleotide
  source 1..807: mol_type = other DNA
gaagacttaaggttccggaactaggggattgggtggatactacggtaaagatggtggtttattgttagatggagagtatggttccggatcagccgctgctgctgccgctgctgccgccgccgcttctggaagccgtggcttgggtggtttttatggcgacggacttctggatggaggctatggttctggctctgccgccgctgccgccgcagcagccgctgctgcaggatcaggaagtagaggattaggaggtttttatggtgacggactcttggacggaggatatggttctggttctgcggcggcggcagctgcggctgctgcagccgcaggcagtggatctcggggattgggtggctactatggcgacggaatattggatgacggttacggttctggttcggctgccgctgccgctgcagctgcagcagccgctgccggatctggctcaagaggacttggtggctattacggagacggacttttggacggtgagtatggttctggtagcgccgcagccgctgccgcagctgcagctgcagccgcaggatcgtccggagttggatatggacgtagatatggttctgattccgcagcggctgcagcagcagccgcagcagctgccgccggttcttcgtctgactacactgtttacgaatcttcacgaagaggatcatcatcttccgcagcagctgctgcagcagcagctgctgctgctggtagttccgaagctggttatgaacgtggatatgaatctgatagtgctgcggctgcggcagctgcagcagctgccgcaggtacgtcttc

SEQ ID NO: 2417 - DNA, 588 bp, synthetic construct
  misc_feature 1..588: note = Description of Artificial Sequence: Synthetic polynucleotide
  source 1..588: mol_type = other DNA
gaagacttaaggttccggaagtagaggcctgggcggtttctatggcgacggattactggatggaggatatggcagtggttctgctgcagcagctgctgcagctgccgctgcagctggtagcggctccagaggtctgggaggttattatggagacggtttacttgatggcggctacggatcaggatcggctgccgccgctgctgcggctgctgctgctgcaggatcaggttctagaggattgggtggctattacggagacggattgttggatggtgagtacggatccggttcagctgccgcagctgcggccgctgcagctgctgctgagggatcatcaggcgttggatatggtagacgttacggtagcgattctgctgctgccgctgcagcagccgctgccgctgccgcaggatcctcctccgattatactgtgtacgaatctagtagacgtagaagttcaagtagtgcagcagcagccgcagcagctgcggctgcagcaggatcttccgaggcaggttacgagagaggctatgagtctgattctgctgccgcagccgccgctgctgccgcagctgcaggtacgtcttc

SEQ ID NO: 2418 - DNA, 684 bp, synthetic construct
  misc_feature 1..684: note = Description of Artificial Sequence: Synthetic polynucleotide
  source 1..684: mol_type = other DNA
gaagacttaaggttctggttcaagaggacttggcggattctatggtgacggtttgcttgatggaggttatggttctggttccgctgctgcggctgccgctgctgcagcggctgctggctccggatccagaggattaggaggttattacggtgacggtttattagacggtggatatggatctggttcagcagcagcggcggctgccgccgcagccgcagccggttctggcagtcgtggccttggaggatactatggagatggtctattggatggtggatacggctctggaagtgctgcagctgcagccgctgcagctgcagctgccggttctggaagtggtggcttaggtggctactacggtgatggtctgttggacggagaatacggatcgggttcggctgcagctgcagcagcagcggctgctgctgccgagggctcatcgggtgtaggatatggcagaaggtatggttctgactcagcagctgctgctgctgcggccgcagctgctgcaggatcctccagtgactattctgtctataaatcatccagaagagaaagttcctccagtgcagccgccgcggctgctgcggctgcagccgccggctcatccgaagcaggctacgaaagaggatacgagtccgactctgccgcagcagctgcagctgctgcagcaggtacgtcttc

SEQ ID NO: 2419 - DNA, 639 bp, synthetic construct
  misc_feature 1..639: note = Description of Artificial Sequence: Synthetic polynucleotide
  source 1..639: mol_type = other DNA
gaagacttaaggtgatgctattgatgacagtctattaaatttcaataatgaaaacttcattgaaatcggtgagtcgactaccgctgaagttgatgtagaaaacggcactctagtagaaagggaaaccacccgtaaaaaatacgaacgtgacggtgatataacccctaatatctcaggtgaagataaaatcgtgagaacttttgtcatagaaacagatgcttctggtcatgaaactgtctacgaggaggacgtcgtcattaaacgtaagccaggccagcaaggtgtgactgagcgtacaactataggccgtagacaaactggtataagtgccgcaccagtgcctgcccctagttcccaggctccaaccgtcgttgttgaatccaattcacctatcgcgccagcgccagttagtggacctgtttccatcggtcctcaattgggcgccgttggcccttacggtccatcaagaagctcaaccgcaacaaccacctctggtaccggtgttgttcagcaaatccgtactgacagcactggttcatcagcggcttcagctgctaccggcgcttcttccgtagctccagttattgttatcgaggacggtagcagcgccgcgtctgctgcagctgcaggtacgtcttc

SEQ ID NO: 2420 - DNA, 327 bp, synthetic construct
  misc_feature 1..327: note = Description of Artificial Sequence: Synthetic polynucleotide
  source 1..327: mol_type = other DNA
gaagacttaaggttctggagcatccggtccaggaggactgggtctgggcggcttaggcccgtatggcggaattggccctaacgtggtgtccgcagcaagcgcccctgtcgttggaccttctgtgagctcagtcggacctgttggagcccaggtgatcgagatcggttctccagttgtgccatccgtgagcagaactggcagtgtttctagagtttcagtctctggtagacctggagtcagagtcccgtgtagtcttacaagaaggcaatttgtcgtcaaaattggtactaggagacaaccatgtggttattgctcaggtacgtcttc

SEQ ID NO: 2421 - DNA, 1461 bp, synthetic construct
  misc_feature 1..1461: note = Description of Artificial Sequence: Synthetic polynucleotide
  source 1..1461: mol_type = other DNA
gaagacttaaggttcaggtgcaagtggtgtgggcggattgggactgggtgcattgggtcctttaggtggtattggtcaatcaggagtctcttcagctaccacgtcgggagcaggcctaggtggtgtgggagccgtgggagcctcgggtttaggtggtcttggtggagctggagcttctgctgctggatccgctggagctggactcggtggagtaggagtgggtggatcctcaggatcatctgctgcatctgccgcatctggcgctagcggtgcaggcgaggttatattaattgatgatcgttcttctgctgcttccagggcagctgctggttccggagcttccggtgtgggaggtttgggtttgtcaggattgggtccaatcggaggtattggaccaattggtgccacaagtgcctctacttctggtgccggtcttggtggtgtcggagctgctggcgcctctggcttgggaggtctaggaggcgctggtgcaagtgccgctggttctgcgggtgctggattaggaggtattggagcaggaggatcatcaggctcgtcagctgcatccgcagcatccggtgcctctggtgctggtgaagtaattgtgatcgacgatagatcatcggccgcatccgctgccgcagcatcttctggagcatcaggtctgggtggtctaggacttggaggactcggaccttatggtggtataggtttaaatggtgtttctagcgcatccgctctaggcgctggacttggcggagttggaactgcaggagcttctggcctgggtggtttaggaggagcaggagttagtgcagttggacctgccggtgcaggcctgggaggcgttggtgccggaggatcgtcaggatcttcagcagcctctgcagcctccgccagaagtggtccagcgccagttatcgttattgaggacggtagttctgccgcatctgctgcagctgctggtagtggagcatcgggcttaggtggtctaggcctcggagcgtggggacctttgggtggtataggacctaacgaggtttcttccgcttccgctactggaagtgcagctggatccactggtgcaggtttgggaggttccggtgcagctggtagtagtgctgccagtgctgctagtggcgctgctggtccagctccagtaatagtgatcgaagatggatcctctgcagcttccgcagctgccgctggaagtggtgcatcaggcctgggcggtcttggtttaggcgctatgggaactcttggtggtattggaccgaatggtgtgtctagcgcttccgccacgggttcagccgcaggatctatcggcagcggactttgcggcagtggtgcggcaggttccagcctggcttcagcggcttccggtgctgctggagcagcaccagtcattgtcatagaggatggatcatcagctgcctctgccgcagctgcaggtacgtcttc

SEQ ID NO: 2422 - DNA, 1704 bp, synthetic construct
  misc_feature 1..1704: note = Description of Artificial Sequence: Synthetic polynucleotide
  source 1..1704: mol_type = other DNA
gaagacttaaggttctggagcatccggtgtcggtggattgggtttgggagctttaggtccactgggtggaataggtcctatcggtgcctcttccgctggtgcttccggagctggattgggtggtgttggagcagctggaacatctggccttggtggtatcggtggagtcggagcttcaaccgctggatccgctggcgctggtttgggaggtataggagccggtggttcgtcgggatccagcgctgcgtccgccgcatccggagctagtggtgccggtgaagttatagttattgatgacagatccagtgccgcatcggcagctgcagctggctctggtgctagtggccccggaggcctcggattgggagtctggggtcctttaggtggtataggaccaattggagcttcatccgcatctgcaagcggagctggtttaggtggagtgggagccgccggcacttccggtttaggcggattgggcggtgctggtgcatctgcggctggatctgctggtgctggtttgggtggtattggagcaagtggttcctcaggatcaagtgtcgcttcagctgccagtggtacttcaggagccggagaggtgatcgtaattgacgatagaagctcggctgcttcagccgctgcagctggctcaggagcgtctggacttggcggtctaggtctgggtggactcggtccatatggtggaattggtctaaacggagtgtcgtctgcttccgctctaggcgctggattgggtggagtcggtacggcgggagcttctggcttaggtggacttggaggaaccggcgcctcggcagctggtagtgccggtgctggcttaggaggcgttggtgctggaggttcttttggttctagtgcagcctccgctgctagtggagcatcgggtgctggtgaagtgattgtaatagacgatagatcttcagccgcaagtgctgctgcagctggttccggcgccagcggtccaggcggcttgggtttgggtgtctggggacctctaggcggtatcggtccaaacggtgttagttccgccagtgccactggttcggccgccggatccaccggagctggtctaggaggatctggtgcagcaggttcaagcgctgccagtgctgcctcaggagctgccggaccagctcctgtcattgttatagaggatggttcaagtgccgcctcggcagctgctgctggttccggtgcaagtggtctaggtggattgggtctgggagcctggggtcctcttggtggaattggacctaatggagtctcctctgcttcagcaacgggatctgccgccggatcaactggtgccggtttgggtggctcaggagcggctggttccagcgccgcttcggcagcatctggagccgcaggacctgctcctgtgatagtcatcgaagatggttcctcagcagctagtgctgcggccgccggttcaggtgccagcggtctaggaggcttgggactaggtgcatggggacctttaggaggaatcggacctaatggtgtttcatcagcttcagctacaggatctgccgccggcagtactggagctggtctgggtggttcaggagctgcaggctcctcggcggcatcagccgcttctggagccgcaggtcctgctccggtgattgttatagaagatggttcatctgcagcctccgcagccgcagcaggtacgtcttc

SEQ ID NO: 2423 - DNA, 414 bp, synthetic construct
  misc_feature 1..414: note = Description of Artificial Sequence: Synthetic polynucleotide
  source 1..414: mol_type = other DNA
gaagacttaaggtaatattaatgatttcgatgaggattacttcggttccgacgttaccgtccaaagttcaaatactacggatgaaatcatcagagacgcatctggagccgtaatcgaggaacagataaccacaaaaaaaatgcaacgtaagaacaaaaatcacggtatccttggcaaaaatgagaagatgataaaaacttttgttattaccaccgactcggacggtaacgaaagtattgttgaagaggacgtgcttatgaaaacattgtccgatggtactgtggcccagtcatacgttgccgctgacgcaggagcctattcgcagtccggaccttatgtcagcaactccggttactcaacacatcaaggttacacttctgatttcagtacctccgctgctgtaggtacgtcttc

SEQ ID NO: 2424 - DNA, 471 bp, synthetic construct
  misc_feature 1..471: note = Description of Artificial Sequence: Synthetic polynucleotide
  source 1..471: mol_type = other DNA
gaagacttaaggtgctggtgctggctccggtgctgcttccggagctggtgccggtgctggtgctggtacaggctcatcaggatttggaccatatgttgctaacggaggatactcccgaagagaaggttacgaatatgcatggtcctctaaatctgacttcgagactggttccggtgccgccagtggagcaggagcgggcgccggtagcggtgcaggagctggatctggcgctggtgcaggctctggagccggcgcaggttccggcgcaggcgccggtggtagcgtgagctacggtgctggtagaggttacggtcagggcgcaggctctgcagcctcttctgtgtcatctgcatcgtctagatcatatgattattcccgcagaaacgtcagaaaaaattgcggaatccctagacgccaattagtggttaagtttcgagccttgccatgtgttaattgcggaggtacgtcttc

SEQ ID NO: 2425 - DNA, 1230 bp, synthetic construct
  misc_feature 1..1230: note = Description of Artificial Sequence: Synthetic polynucleotide
  source 1..1230: mol_type = other DNA
gaagacttaaggtgcaggagccggttcgggtgcaggagcaggttccggagccggcgcaggttctggagcaggagcaggttcgggtgctggctacggtgcgggagtgggagcaggctacggtgctggttacggtgctggtgctggagctggttatggtgctggtgctggctctggcgctggtagtggcgcaggcgccggatctggtgcgggcgcaggttcaggtgccggtgctggatccggtgcaggagcaggatccggtgctggtgccggctctggtgctggtgctggtagcggtgccggagcaggatcaggagccggtgcaggatcgggagcaggagctggatacggagcaggctacggcgcaggagctggagctggatatggagccggagctggcagtggtgcaggttcgggagctggcgcaggttctggtgccggtgccggttctggtgctggagccggttctggagctggagcaggttcaggagctggagctggttctggtgcaggcgcaggctccggtgcgggtgccggctctggagccggagccggatacggtgctggagttggagcaggttacggtgccggttatggagcaggagccggagccggttacggagctggtgctggttcaggtgctggatccggtgccggtgctggttctggagctggtgccggttccggagctggagccggctcaggtgctggtgttggatcgggagccggtgctggctccggagcaggagctggttccggtgccggagcaggtagcggcgccggagcaggatacggtgcaggatatggtgccggcgctggtgccggatatggcgctggtgcaggatccggagcaggctcgggtgctggagctggatccggagccggtgccggaagcggcgctggcgccggttctggagccggcgctggaagcggagctggtgccggatctggagctggtgctggaagtggtgctggtgcaggttctggtgccggagttggttacggagcaggagttggcgccggatacggtgctggctacggcgctggcgccggagctggttacggagctggcgcaggatcaggagcagcatcaggtgctggtgccggtgctggagctggtgcaggtacaggttcctctggttttggtccttacgtcgctaacggaggatactccggatatgaatacgcttggagttctgaatcggattttggcacgggctcaggtacgtcttc

SEQ ID NO: 2426 - DNA, 978 bp, synthetic construct
  misc_feature 1..978: note = Description of Artificial Sequence: Synthetic polynucleotide
  source 1..978: mol_type = other DNA
gaagacttaaggtgctggagctggttctggagctggagctggtgcaggagctggcgctggaagcggagctggagctggttatggagctggtgtcggagcaggttacggagctggatacggagctggtgccggcgccggttacggtgctggagccggatctggcacgggttccggtgctggagcaggatctggtgctggtgccggatacggcgctggcgttggagctggatacggcgcaggcgcaggaagtggtgctgcttttggtgctggtgcgggcgcaggcgcaggttccggagccggtgccggctcaggtgctggtgctggttccggagccggagcaggcagtggtgccggcgcaggatctggtgcaggagctggatatggtgccggttatggtgccggagttggtgcaggatacggagccggtgccggtagtggtgcagcttctggcgctggcgcgggatctggtgctggagctggaagcggcgcaggagctggttctggtgctggtgcaggatcaggagcaggagctggatctggagctggtgcgggctacggagccggagttggtgctggttatggtgctggttacggagctggcgctggagcaggatacggtgccggtgccggctccggagcagcttcaggtgcaggcgctggttcaggagccggcgcaggagcaggatcaggagcgggcgctggatccggcgctggcgccggttccggtgcaggcgccggaagcggagcaggttccggtgccggcgctggttcgggagctggtgccggatctggagccggtgctggatatggtgctggtgccggttcgggtgcagcttctggtgccggagccggagccggtgctggagccggtacaggttcttccggtttcggaccttacgttgcaaatggaggatactccggatacgagtacgcgtggtcctcagaatccgattttggaactggttcaggtacgtcttc

SEQ ID NO: 2427 - DNA, 1194 bp, synthetic construct
  misc_feature 1..1194: note = Description of Artificial Sequence: Synthetic polynucleotide
  source 1..1194: mol_type = other DNA
gaagacttaaggtgccggtgcaggatcgggagctggcgctggatctggtgcaggagccggatatggagccggttatggtgccggagttggagcaggttacggtgccggtgcgggcgtaggatatggtgccggagctggtgcaggatacggagctggagctggctcgggtgctgcaagcggagctggagccggtgccggtgctggtgcaggatccggagctggagcgggttctggtgctggtgctggcgcaggctcaggtgctggtgccggatatggagcgggatacggaattggtgtgggagctggctacggtgccggtgctggagtcggttatggtgctggcgcgggagctggatatggcgcaggagccggttccggagccgcttcaggtgccggtgccggtagcggtgcaggcgctggatcaggagccggtgctggctctggagccggtgcaggttctggagccggtgccggaagtggagccggtgccggatcaggcgccggtgctggatacggagctggatatggagctggtgtgggcgcaggttacggagctggtgctggtgttggttacggtgctggtgccggtgcaggatatggtgctggagcaggttccggcgctgcttcaggtgctggagctggtgctggagccggtgctggagctggttcaggcgcaggagctggatcaggagccggcgccggatcaggagctggtgctggttctggtgctggagctggaagcggagccggcgctggttctggagctggagctggatctggtgcgggcgcaggatcgggtgccggagcaggctcaggagctggcgccggatacggagctggtgtcggtgctggttacggagctggttatggcggtgcgggtgcaggttatggagctggagcaggttctggagctgcttctggtgctggtgcgggctcaggagctggagctggatccggagccggtgctggatctggcgccggtgcgggatcaggtgcgggtgctggaagtggcgcaggcgctggctatggagctggcgccggcagtggtgccgcttctggtgcaggcgctggagccggagcaggcgcaggtacaggttcttctggtttcggtccatacgttaacggtggatattccggatatgaatacgcgtggtcatcggaatctgactttggaactggatcaggtacgtcttc

SEQ ID NO: 2428 - DNA, 528 bp, synthetic construct
  misc_feature 1..528: note = Description of Artificial Sequence: Synthetic polynucleotide
  source 1..528: mol_type = other DNA
gaagacttaaggtgcagatattttggaaactggtattcttggaggcaatgtccgcgaggtttctgaatcgactactgataattttaccactgatggtaatggtaacgtgaccgaagtaaaaacaacacataaagaattccgcagacaaggtgaggttcctaacaatatttcaggagaggacaaactcgtcagaacttttgtaatcgaaaccgacgcatcgggaaacgaggtcatatacgaggaggatgtagttatccataaggttcctggtactagtgcaactacaaagactactaccgctagaaggcaacttggtggtatcggtggtacaggagcagcctcctcttctgccgcaactagtcctcctcggcctactagtccatatggtccaaatggttcctctagtgcagctacttcttctgcttccggttccgccccagttattgtcattgaagagaatcagagctcggctgccgccgctgcttcttcttccagctccggaccaaatggactcctaggtacgtcttc

SEQ ID NO: 2429 - DNA, 591 bp, synthetic construct
  misc_feature 1..591: note = Description of Artificial Sequence: Synthetic polynucleotide
  source 1..591: mol_type = other DNA
gaagacttaaggtccatacggaccaaatggttcgagtgcttcaagcgcagcttcttccggagctgcaggagctggtggccttaacggaatatacggtagtaacggtgctttgttgagcggcgctgcaggcgtcaacggtttaaacggtctttacggcccaaacggcagttctgcttcttctgcaggagccgcaggaattggtggtctaaatggattaaacggttcaaacggatcttcctcggccgctagttcttcagcttctggctctggaccagtaatcgtgatcgaggaaaaccaatcttctgctgccgctgccgcctcctcttctagttcgggaccaaacggtttgttgggtccttacggtcctaatggatctgcggcttcaagtgccgcagcaagtaatgcaggaaataacggtcctgtagttattatagagaggggatcctcttcatccgcagctgcgggttcatcatcatctgccccttacgtccttccaggtgtccgtggaccttgtcgactaaccaggagacagttcgtagtgaagataggatctagacgacaaccttgtcttacttgttcaggtacgtcttc

SEQ ID NO: 2430 - DNA, 705 bp, synthetic construct
  misc_feature 1..705: note = Description of Artificial Sequence: Synthetic polynucleotide
  source 1..705: mol_type = other DNA
gaagacttaaggtccatacggtccaaatggttctgctgcatcgtcagcagctgcaagtggagccgctggagccggtggcctaaatggattatatggatccaatggcgccttattgtccggagctgcaggagtcaatggtttgaatggtttgtatggacctaatggttcatcggcttcatccgctggtgccgccggcattggcggtttaaacggtttgaacggcagtaatggatcagcatctgccgcatcatcctcagctagcggtagtggacctgtcattgtaattgaggagaaccagtcgtccgccgcagcagccgcctcttcatcaagttcaggacaaaatggcttgcttggaccgtacggtcctaacggaagttctgcttcctctgcagcctcctctggtgctgccggcgccggtggtcttaatggtatttatggatctaacggtgctttgctctcaggtgctgcaggagcaaacggcgttaacggtctgtatggtccaaacggatccagcgcatcttccgccggtgctgcaggaatcggcggactcaatggcctaaatggttcaaacggttccgcttctgcagcttcatctagcgcttctggaagcggacctgtaattgttattgaagagaatcaatccagcgccgctgctgcagctagttcctcctcttctggccctaacggattgctaggtacgtcttc

SEQ ID NO: 2431 - DNA, 705 bp, synthetic construct
  misc_feature 1..705: note = Description of Artificial Sequence: Synthetic polynucleotide
  source 1..705: mol_type = other DNA
gaagacttaaggtccttatggacctaacggtagtgcagcttctagtgccgccgcctcaggcgctgccggtgctggaggtctgaatggtctttatggttccaacggtgcattgctgtccggtgctgccggagttaatggcttgaacggcctatatggacctaatggttcgtctgcgtcctcagcaggcgctgcaggaatcggaggattaaatggtctgaacggttcgaacggatcagcttctgctgcctccagttccgcatctggaagtggaccggtaattgtaatagaagaaaatcaatcttcagctgctgctgccgcgtcatcatcttccagtggccagaatggcttgttaggcccatatggcccaaacggaagcagtgcatcctctgcagcaagttctggagctgctggagctggtggtttaaacggaatttacggctctaatggtgctttgctttctggtgctgccggtgcaaacggtgtaaatggcttgtacggaccaaacggatcaagtgccagctcagctggcgctgccggtatcggtggtttgaacggacttaatggatcaaatggatcagcatcagccgcctcctcgtccgcgtctggatcaggtccagtcatagtaattgaagaaaaccaatcttccgctgccgctgcagcttcttcaagtagttccggtccgaatggcttactaggtacgtcttc

SEQ ID NO: 2432 - DNA, 945 bp, synthetic construct
  misc_feature 1..945: note = Description of Artificial Sequence: Synthetic polynucleotide
  source 1..945: mol_type = other DNA
gaagacttaaggttacggttcgggttcttccgccgcagcagccgctgctgcagcagccgccgcttccagaagagcaggccacgaaagagctgccggttccgctgctgctgctgcagccgcggctgccgctgctgcctccggtgtgggtagaagtggtggctcatatggttggggtgatggaggctacggatcagactctgccgctgctgctgctgccgcagctgctgcagctgctgctgcttctggagcaggaggagcaggagtatgtagaggttatggtggttacggatctgacggaagtggaagtgcagccgctgcagctgcagctgcggctgctgctggtagtggcgcaggaggcgttggaggaggttatggttggggagacggagcttatggttctgattcagccgccgccgcagcagctgcagccgcagccgccgctggttcaggtgccggtggtagacgcggatacggagcctacggatccgacagcagcgccgcagccgcggcagctgcagctgccgcatccggtgctggtggttctggtggtggttatggatggggagatggtggatacggatccgactcggctgcagcagcagctgctgcagccgctgctgccgctgctgctggttcaggagccggaggtataggtggaggattcggaagaggtgatggaggatacggttctggaagttcagcagcagcagcggctgctgctgcggctgccgctgcgagacgtgctggtcatggaaggtctgctggtagcgcggcagcagctgctgccgcggcagcggccgctgctgctagcggagctggaggatccggaggttcttacggttgggattatgagtcatatggtagcggttctgctgctgcggccgccggttcaggcgcgggaggatctggaggtggttatggttggggtgacggaggtacgtcttc

SEQ ID NO: 2433 - DNA, 297 bp, synthetic construct
  misc_feature 1..297: note = Description of Artificial Sequence: Synthetic polynucleotide
  source 1..297: mol_type = other DNA
gaagacttaaggtggatatggagcaggaagcgcagctgcagcagcagctgctgcggccgctggtgctggagctagcagacaagtgggcatctacggaactgatgatggctttatcctagacggaggttacgactctgaaggttccgctgccgcagctgccgccgcggccgctgctgccgcctcctcttcaggaaggtctacagagggtcaccctttattgagcatttgttgtagaccatgttcacattcccacagttacgaagccagcagaatgccagtccattcaggtacgtcttc

SEQ ID NO: 2434 - DNA, 489 bp, synthetic construct
  misc_feature 1..489: note = Description of Artificial Sequence: Synthetic polynucleotide
  source 1..489: mol_type = other DNA
gaagacttaaggtgctacgggtgctactggacctcaaggtatacaaggacctgctggagctacaggagctactggtgccacgggtccacaaggccctcagggcattcaaggtccagctggtgccacaggagccacaggtgcccagggtgcacaaggcccagctggtgcaactggtcctcaaggccctcaaggtattcaaggacctgccggtgccactggtgcgacgggagcccagggagctcagggaccagctggagcaacaggtgcaacaggagcaactggtgctcaaggcccacagggtgttcaaggtccagcaggcgccaccggagccacaggagcccaaggtccagctggcgctactggagctaccggcgccactggagctcaaggcccacaaggtgtccaaggaccagctggtgctacaggagcaactggagctcaaggtccacagggagttcagggtccggctggtgctacaggtacgtcttc

SEQ ID NO: 2435 - DNA, 534 bp, synthetic construct
  misc_feature 1..534: note = Description of Artificial Sequence: Synthetic polynucleotide
  source 1..534: mol_type = other DNA
gaagacttaaggtgctacaggagcacaaggtcctcaaggcattcaaggtccagctggagccacaggtgctactggccctcagggtccacagggaattcagggtccagctggtgctacgggcgcgaccggtgcacaaggtgcgcaaggtcctgctggtgctacaggagctactggtgctcaaggtgcccagggaccagccggcgccacaggtgcaaccggcgccactggagcacagggaccccagggtgttcaaggaccagccggtgcaactggtgctcagggtgctcaaggagttcaaggaccagcaggagctaccggagctaccggcgctcaaggacctcaaggtgtacaaggtcccgctggtgcaaccggagcaaccggtgcccaaggtccccaaggcgttcaaggacctgccggagctaccggagccaccggtgctcagggtcctcaaggtgttcaaggcccagctggcgccactggagctactggagcgcaaggaccacaaggagttcaaggtcctgcaggtacgtcttc

SEQ ID NO: 2436 - DNA, 1041 bp, synthetic construct
  misc_feature 1..1041: note = Description of Artificial Sequence: Synthetic polynucleotide
  source 1..1041: mol_type = other DNA
gaagacttaaggtctgcaaggtccacaaggaattcaaggtgttcctggtccagtgggtgccaccggtcctgaaggtcctcagggtattcaaggtattcaaggagtacagggtgctactggtccacaaggtccacaaggtattcaaggcatacaaggcgttcaaggaattacaggagcaacaggtgttcaaggtgctaccggtattcaaggcatccaaggagagatcggagctacgggtccagagggtccacagggtgttcaaggtgcacaaggtgccataggtcctacaggtcctatgggtcctcagggtgtacagggagtgcagggaatccaaggagccactggagctcagggtgtgcagggtccacagggtattcagggaattcaaggaccaactggagctacaggcgatatgggtgctaccggagctactggagagggagcaactggcccaactggtgtcaccggaccaactggagtgaccggaccttcaggtggccccgctggacccaccggccctactggtccttcgggaccagcaggagttacaggaccttcaggaggaccacctggtcctactggtgcaactggtgcaacaggaataacgggcgatactggagctactggctctactggagttacgggcgccactggcgaaactggtgccacgggtgttactggcctgcaaggtcctcagggaatccagggcgttcaaggagagatcggtcctactggacctcaaggtgtgcaaggtcctcaaggtattcagggagttaccggcgccacgggtgaccaaggacctcagggtatccaaggtccccaaggagatattggacctactggacctcagggtatacaaggaccccagggatcgcaaggaatccagggtgcaactggaggtaccggtgcacagggtccccaaggaatccaaggtccacagggtgatattggtccaaccggtccacagggtccgaccggtatacaaggaattcagggtgaaataggccctactggaccggaaggccctgaaggtacgtcttc

SEQ ID NO: 2437 - DNA, 867 bp, synthetic construct
  misc_feature 1..867: note = Description of Artificial Sequence: Synthetic polynucleotide
  source 1..867: mol_type = other DNA
gaagacttaaggtgccacaggcgctacaggacctcaaggtgcgcaaggcccagccggagctacgggtgcaacaggcccacagggtgtgcaaggtaacacaggagcaaccggcgctacaggtccccaaggcgctcaaggaccagctggtgcaacgggtgcaactggtccccaaggtgttcaaggaaacacaggtgctacaggagccacgggtccgcaaggtgcccagggtcctgccggtgcaactggagctactggtcctcaaggtgtccaaggaaacaccggagcaacaggtgccacaggaccacagggtgtccaaggaaataccggtgctaccggagccaccggaccacaaggtgtacagggcaacacaggtgctactggagccacaggaccacaaggtgtccagggaaatactggtgctactggagctactggcccacaaggtgtgcagggacctgccggagcgactggcgcaacaggtcctcaaggagtgcagggaccagctggtgctacaggcgctacgggtccacaaggtaataccggtgctacgggagcaacaggccctcagggtgcacaaggtccagcaggagcaactggtgccacgggtccacagggtgtacaaggtaacactggtgctacaggtgctacaggtccacaaggtgctcagggtccagctggcgccactggtgcaaccggtccacagggtgttcagggtaatactggcgccacaggtgcaactggacctcaaggtgttcaaggtaacacaggcgctactggagccactggacctcagggcgttcaaggtcctgctggtgccactggagctacaggcccacaaggtgttcagggtaatacaggtacgtcttc

SEQ ID NO: 2438 - DNA, 1173 bp, synthetic construct
  misc_feature 1..1173: note = Description of Artificial Sequence: Synthetic polynucleotide
  source 1..1173: mol_type = other DNA
gaagacttaaggtgctacaggtccaactggtgcaactggtcctactggagctaccggaccaacgggcgtaaccggcccaaccggagttactggcgcaacaggaccaactggtgttacaggaccgactggagccatgggtccaaccggtgctactggtgccaccggtccaacaggagttactggatccaccggtgttacaggtgctactggagctacgggtccaactggagtcactggtcctaccggcgctatgggtcctactggtgctacgggtgcaacaggcgctaccggtgcaacaggtgctaccggagctacaggtcctacaggtgttactggtgctactggtgctacaggtcctacgggtgtaactggagcaacgggcgctaccggccccacaggtgccactggagccactggcccgactggagctactggtcctacaggagctacaggtgctaccggtccgacaggtgccactggtgccatgggtcctaccggtgccactggacctaccggagccacaggacctactggagttaccggttctactggtgcgacgggagctaccggaccgacgggtgctaccggtgcaatgggtcctacaggagccaccggacctactggagcaacaggtccaacaggtgttactggatcgactggagcaactggagccacaggtcctactggtgctacaggtgctatgggtccaacaggagctactggccctactggtgcaaccggaccgaccggagtaacaggacctacaggtgaaactggtgctaccggaccaaccggtgctacaggccctacgggagttactggagctactggccccaccggcgtaactggtccaacgggagccaccggtgcaactggaccgactggagcgacaggtgcaactggtgctactggacctacaggtgttacgggtgccacaggtgttaccggaagcactggtgccacaggcccaaccggtgcaaccggtcctacaggcgcgacaggagccacaggagcaaccggcccaaccggtgttactggtgcaacgggtgccaccggaccaaccggcgtcactggtccaacaggcgctactggagccaccggagccactggagcaaccggagctactggagctactggacctaccggcgtaacgggagctgcaggtacgtcttc

SEQ ID NO: 2439 - DNA, 750 bp, synthetic construct
  misc_feature 1..750: note = Description of Artificial Sequence: Synthetic polynucleotide
  source 1..750: mol_type = other DNA
gaagacttaaggtcctactggagctacgggacctaccggtacgactggtgcaatgggtccaactggagctactggaccaacaggaacaaccggcgcaatgggaccaacaggcgctacgggtcctactggtaccacaggtgccatgggtccaacaggtgctactggtccaactggtacaacaggtgctatgggacctactggagcaaccggaccaaccggtactactggtgcaatgggaccgactggcgccactggacccacgggaacaaccggtgctatgggtccaactggcgctactggacctactggagctactggtcctacgggcgtgactggtagtactggtgccacaggagccacaggagcaactggtccaacgggcgccactggcgccatgggccctactggagcaacaggtcctacaggagctacaggacctaccggagtgactggcgctaccggtccaacgggtgttacaggaccaactggtgcaactggtgccactggtcccacgggtgcaacaggagctacaggcgctactggaccgacaggcccgactggtgtcactggtgctgctggtgccaccggaccaactggagtaaccggtgcaactggtgttacaggtagtacaggagccactggagccactggtgctacaggtgcaaccggtcctactggagtcaccggtgccgctggagctacaggccctacaggtgccgctggcgccaccggtccagcaggtacgtcttc

SEQ ID NO: 2440 - DNA, 651 bp, synthetic construct
  misc_feature 1..651: note = Description of Artificial Sequence: Synthetic polynucleotide
  source 1..651: mol_type = other DNA
gaagacttaaggtggtgcagaggaaaaagccatgaagccctctgagtctccagaatctgctaagaatgaggctggtggcgctgaggagaaggctatgaaaccctcgggttcggctgagtcggctaaaaacgaagctggaggtgctgaagaaaaagaaactaaaccttctgaatctcctgagtccgctaagaacgaggctcgcggtgccgagggaaaggaaaccaagccaagcgagtctccagagtcagctaagaacgaggccggaggagctgaagagaaagaaacaaaaccttctgagtctcccgagagtgctaagaacgaagctggaggagcagaagataaggctatgaagccttctgagtctgctgagtctgccaaaacagaagctggaggagctgaggaaaaggccatgaagccaagtgagtcgccagagtctgctaaaaatgaggctggtggagccgaagaaaccagcatgaagccatctggatcagcggaaagtgctaaaaacgaggcgggaggcgctgaagaaaaggagactaagccctccgagtccccagagtctgcaaaaaacgaggccagaggtgccgagggtaaagaaacgaagccttctgaaagtccagaatcggccaaaaatgaagcaggtacgtcttc

SEQ ID NO: 2441 - DNA, 924 bp, synthetic construct
  misc_feature 1..924: note = Description of Artificial Sequence: Synthetic polynucleotide
  source 1..924: mol_type = other DNA
gaagacttaaggtgattctaacaccgatactaacactgataccaacaccgataaaaatttcgacgccaacactgatagcaatacagattcaaatactgaaacgaacaccgactccaacactgaaaccaacacagattccaacactgatacaaatactgattctaacactgacactaatacagacaaaaataccgacaccaacactgattctaacactgatactaatacagatacaaataccaatacggataccaatacggacactaataccaacacggatactttcacagataagaatactgattctaataccgacacaaacactgatacgcacacagacaccaattcggattccaatacagatactaacaaggacaccaataccgacaagaatacggatacaaatacagattctaacactgactcaaataccgatacaaatacggacactaacacagacactaacactgataaaaatttcgatgctaacactgattcgaacacggactctaatacagacaccaacacggactcgaacaccgaaactaatactgattcaaacacagacacaaacacggatagtaacactgatacaaacacggacaaaaatactgacaccaatacagactcaaacactgatactaacaccgataagaacactgataccaatacggattctaataccgataccaataccgattccaataccgatacgaatactgataagaatactgacacaaatacagactctaataccgacactaacacggattccaatactgacactaacatggatacgaataccgataaaaatactgatacaaagacggattctaatactgactccaatactgataccaatacagactcgaatactgataagaacactgacacaaagaccgattctaatacaggtacgtcttc

SEQ ID NO: 2442 - DNA, 600 bp, synthetic construct
  misc_feature 1..600: note = Description of Artificial Sequence: Synthetic polynucleotide
  source 1..600: mol_type = other DNA
gaagacttaaggtgacatcagagatgcacgtgacgtgcgagacgctcgcgacataagagatatcagagacgcacgagatattcgagatccacgggacataagagacattagagattctagggatattcgagatattagagacgcaagagacatcagagacatgagagatcctcgtgatgttagagatgttagagatcctagagacgtccgtgatgtacgtgacatccgtgatgttagggatgttagggacatcagagactctagggaagtcagagacggtagagacgccagagaagtccgagatatcagggacgcgagggaggtccgagacatcagggacgctagagaagttagagacattagagacgccagggaggttcgagatattcgcgacccacgcgaagtgcgtgatacaagagaggtacgcgacgccagagaagtgagagacgctagagatgctcgtgaggttagagaggcacgtgaagctagagacgttcgtgatgcgcgagatgtacgagatattagagaagcccgtgaagttagggacgttcgagatgctagggaagtaagggatattagagacgttcgaggtacgtcttc

SEQ ID NO: 2443 - DNA, 543 bp, synthetic construct
  misc_feature 1..543: note = Description of Artificial Sequence: Synthetic polynucleotide
  source 1..543: mol_type = other DNA
gaagacttaaggtaaagaatccgacagaagcaaggagagggaccgagagcgcgacagatctagggaaagggacagagaacaaggtcactctagagaaaaggaaagggagcattccaaggaacgtgaccgatctcgcggtcgtgaatctgaccgtggtaaggagtcagacaggggaaaggagagcgagaggggtaaggagagtgagagaggcaaagagtcagaaagaggaaaagagtcggagagaggaaaagagttcgatcgcggtaaagaatctgatcgaggaaaagaatccgatagaggtaaggaatcggatagaggaaaggaatctgaacgaggaaaagaatcagagaggggcaaggagtctgaccgtggtaaagaatcagataggggtaaagagtccgataggggtaaagaaagcgaccgtggcaaggaatctgatcgaggtaaggagtctgatcgtggaaaagaatcagatagaggcaaggaatctgaccgaggtaaggagagcgaccgtggtaaggaatcagaccgaggtacgtcttc

SEQ ID NO: 2444 - DNA, 378 bp, synthetic construct
  misc_feature 1..378: note = Description of Artificial Sequence: Synthetic polynucleotide
  source 1..378: mol_type = other DNA
gaagacttaaggtagaccagagatgtaccctgagggtgttagaccaggaacggtcatttctggtgctgaacgtacttatccaggtggcgtcagacctggcactgttactcctggaactgaagaaatttacccaggtggtgcacgtcccggaacagtgacaccaggcatcgaggagatttacccgggaggtgtacgaccaggaacagttattccaggtgccgaaagaacgtacccaggaggtgtccatcctgacattgtcctaccaggagttgaaaagtcttatcctatagacatccgtccaggcacagttacacctggtgctgatggcatgtatccagaatctgtcagaccaggttcagtaaccccaggtacgtcttc

SEQ ID NO: 2445 - DNA, 693 bp, synthetic construct
  misc_feature 1..693: note = Description of Artificial Sequence: Synthetic polynucleotide
  source 1..693: mol_type = other DNA
gaagacttaaggttctacaacccaaccaggttcgggatcaactacccaaccaggcagtggttctaccacgcaaccaggcagtggatctacaactcagcctggttccggatcgaccacccagcctggatccggctctacgacccaacctggatctggaagtacaacacagccaggtagtggttctactacccagccaggctctggttcgacgactcagccgggtagtggatctaccacccaaccaggaagcggctctactactcagcctggtagtggaagcactacccagcctggatctggttcaactacacaacctggtagtggatccacaactcaacctggttctggatccaccactcagccaggttctggatctactactcagccaggaagtggttctacgacacagccaggatcaggttccacaactcaaccaggtagcggttcaactacacagcctggttctggctccacaactcagcctggctctggttccacaacacaacctggttctggttctacaactcagccaggttccggatcaacaacccaaccgggatccggtagtacaacacaaccaggttcaggtagtacgactcagcctggttcaggatctaccactcaaccaggatccggatccactacccagccgggttctggttccactacccagccaggttcaggtacgtcttc

SEQ ID NO: 2446 - DNA, 501 bp, synthetic construct
  misc_feature 1..501: note = Description of Artificial Sequence: Synthetic polynucleotide
  source 1..501: mol_type = other DNA
gaagacttaaggttctcctagaactacaacaggtggtggaatagcctacccaggtggtatcccgacgactacaacgggaggaggtattgcttacccaggaaacattcccaccactaccaccggaggaggtgtggcttatcctggtaatattccaacaacaacaactggaggtggcacggtttaccctggtggagtccctagtaccacgattacaggttctactgtctatccaggaggtgttccttctacaatcacgggtggtgatgttgcttatcctggagatgttccaagcacaactattactggtaccgtatatcccggaggtgtgtcctctgacggtgcagcttacccaggttctatgcccggcaccacgatcggaggtggcgttacttatcctggaagtattccatctactacgactggaggtggtatagcttactccggttcaatacctggaattacaactggtggtggagttacttacccacgaggtacgtcttc

SEQ ID NO: 2447 - DNA, 651 bp, synthetic construct
  misc_feature 1..651: note = Description of Artificial Sequence: Synthetic polynucleotide
  source 1..651: mol_type = other DNA
gaagacttaaggtgttcctggaactattaccggcgcagatgctgttcatcccgaaggagttcctggtgcaacaaccggattgtcaattacgtatccaggtggcgtacctggtacagtgactggaggagatgttgtccaccctaagtccgcaccaggtactactacaggtagaggcgtcacctacccaggtggtgtcccgggaactgttacgggcggtggcgttgtgaacccaaaaagtgcaccaggaacaactacgggtcatggagtagcatacccaggtggcgttcctagaaccctaaccggcggatccacggtctatcctggaggagtctctggaattactacaggtggacatgttgcttatcctggtggtgtggcagctaccaccataggaggaaacgttgcctatccgggtggagtacctagcacaacaacgggtggtggtgttacatatccgggtggcgtacttggaaccaccacaggtgacggtgctgtttatccgggtggtttacctggaacagctactgtaggaggcattacctatcctggcattattagtggaactacgacaggatctggtatcgcatatcctggtggcgtacccggtacaaccactagcgacgatgttacatatcctggaggtacgtcttc

SEQ ID NO: 2448 - DNA, 501 bp, synthetic construct
  misc_feature 1..501: note = Description of Artificial Sequence: Synthetic polynucleotide
  source 1..501: mol_type = other DNA
gaagacttaaggtcatcatggtatcccatgggatacgatggaatatccaggaaccccatggaatacgttgggacatcatggcattccgtgggatactatggagtatcctggtacgccatggaatacacttggacaccatggaattccgtgggacactatggagtatccgggaacgccttggaataccttgggtcaccacggtatcccttgggacacaatggagtaccctggtactccttggaatacccttggtcaccatggcatcccatgggacactatggaatatcccggaaccccatggaacactctcggtcatcatggaatcccatgggataccatggagtacccaggtacgccatggaatactctaggtcaccatggcattccatgggatactatggaatatccgggcactccatggaataccttaggacatcatggtattccatgggacaccatggaatatccaggtacaccttggaacacactaggtacgtcttc

SEQ ID NO: 2449 - DNA, 501 bp, synthetic construct
  misc_feature 1..501: note = Description of Artificial Sequence: Synthetic polynucleotide
  source 1..501: mol_type = other DNA
gaagacttaaggtattcatcaagaggccacttcggaaattcaccctgaagccacttctgagatcccacctgagataacgtccgagattcatcctgaagctaccggcgaaattcaccctgagacgatttcaggaattcaccaggaggccacgtctgaaattcatccagaagccactagtgaaataccaccagagattactagagaaattcatccggaggccacgggagagattcatccggaaaccatatccggtatccaccaggaagctacatcagaaatccacccggaggctacttccgagattccacctgaaatcacctctgagatacacccagaggccacaggtgagatccatcctgaaaccatttcgggaatacatcaggaggcaacgtctgagattcatccagaagctacttccgagatcccgccagagatcactagagaaattcacccagaagccacaggtgaaatccacccagaaaccatctcaggtacgtcttc

SEQ ID NO: 2450 - DNA, 435 bp, synthetic construct
  misc_feature 1..435: note = Description of Artificial Sequence: Synthetic polynucleotide
  source 1..435: mol_type = other DNA
gaagacttaaggtctgcctccgcaaaccacgagagagcttcattcccaatccgcctcagatttgcatcggccctcaacaagtcagatccatagaaggcctactagtaaaattcatccagacccaacttgcgagattcatcaagcctcaacctctgagaagcacccggaagcaacttgtgagatacatccggaatccacatctgagatcttaccagaaaccaccaatgacattcatcgaccatcagccaggcaaatcaaccgaccctcgacaagtgaaataccgcgcgagattaccagggaaattcaccctgaggccacctccgagactcacccagagactactaatgagatacacagaccgtcgacttctcaaatacaccgtccctccaccagccaaattttgcctgagacgaggagcgagttaggtacgtcttc

SEQ ID NO: 2451 - DNA, 750 bp, synthetic construct
  misc_feature 1..750: note = Description of Artificial Sequence: Synthetic polynucleotide
  source 1..750: mol_type = other DNA
gaagacttaaggtccttggtccaaatgctccaaacactgcggagaaggtggtgaacaatcccgtggtatcaagtgtgaacaagtcatatcgggtggaattccaactgtggttgacgactcccagtgtcttgaaaaagttggtcccaaaggccctaccaagcaagaatgcaacaagaacgttacctgtccacagtttcacgtaggaccgtggaaaccttgtgaccatctttgcggtccaggtaagcaaactcgaaaggttacgtgttacatgaaggtcaacggtaagatacagttgcttaaagatcaagcctgtgagggcgaagtacctaagtctgaaaagccttgtgagctaagaccatgtgccggtcttgactgggttacaagtgactggtctggttgtgacgacaaatgcggtctgactgaagaaactcgtactacatactgcgctacccaagacggaacagtttacccagatgagaaatgtgacgccgaaaagaagcctgagttgactagagattgcgaagctgagaaagactgtgagtttttgtggttcgcctctcagtggtccgattgttctgcaaaatgtggaagtggtgtccagacaaggaaagttttctgtggaaccttcgatgatgagactgtaaaaaaagttccagatgaaaagtgcgacgccgacaaaaaattcaatgaaactaagtcttgtatagcaaaggaggagtgtaagggagaatggttcgcaggtacgtcttc

SEQ ID NO: 2452 - DNA, 411 bp, synthetic construct
  misc_feature 1..411: note = Description of Artificial Sequence: Synthetic polynucleotide
  source 1..411: mol_type = other DNA
gaagacttaaggtgcaacagccgagagcgccgctacaactgagccaggcgctacaactgaatccgctgcaactgaaattaccgagtctacagaatctggagctactgaggttaccgagtccactgaaagtggtgctacgaccgagtctggtgccaccactgagtctggtgctactactgagtcaggcgctactactgaatcaggcgctaccactgagagcggtgctactattgaatccggtgcaacaactgaaagcggcgcgactacggagagtggagctactactgaaagtggcgctaccacagagtccgctgccacaaccgaaccaggtactacgatcgaatccggagcgacaaccgagtccggtgctaccaccgaatccggagccaccactgaatcaggtacgtcttc

SEQ ID NO: 2453 - DNA, 786 bp, synthetic construct
  misc_feature 1..786: note = Description of Artificial Sequence: Synthetic polynucleotide
  source 1..786: mol_type = other DNA
gaagacttaaggtattggtggtcaaacgggtgctggacagccaggttatggttctcagccaggagtggcaggccaaaccggagcaggacaacctggttacggttcacaacctggtgtagctggacagaacggtgctggtcagccaggatacggatcgcaacctggagttgccggtcaaaacgtcgcaggtcagcctggctacggaacacaacctggcattggtggacagacgggtgcgggtcagcctggctatggctcacagccaggtatcggaggtcaaacaggcggtggacaaccaggttacggttctcaacctggaattggtggccaaactggtgctggacaacctggttatggttctcaaccaggtgttggcggacaaactggcgccggtcaacctgaagtcggtggacagactggtgccggacaaccaggatttggagctcaaccaggcattggaggtcagacaggtgccggacagccaggctatggcactcaaccaggaatcggaggtcaaactggtgccggtcaacctggatatggatctcaaccaggcatcggtggacagacaggaggaggacaacctggatatggttcccaacctggaatcggtggacaaacaggtgccggccaaccaggatatggtagtcaaccaggtgtcggtggtcagacaggtgctggtcaacccggttatggatcccaaccaggtgttggaggtcagaccggagctggacagcctggatatggttcgcaaccaggtgtgggaggtcaaacaggtacgtcttc

SEQ ID NO: 2454 - DNA, 564 bp, synthetic construct
  misc_feature 1..564: note = Description of Artificial Sequence: Synthetic polynucleotide
  source 1..564: mol_type = other DNA
gaagacttaaggtgttggaggacaaactggtgctggtcaaccaggttttggcgcccaacctggaattggaggacagactggagcaggtcaaccgggatacggtacccaacccggaattggaggtcagacaggtgctggacagcctggttatggatcgcaaccaggtgttggtggacagacaggcgctggtcagccgggcgtgggaggtcagaccggtgctggtcaacccggttttggtgcacaacctggcattggaggtcaaactggtgcgggacaacctggatatggtactcaacctggtattggtggtcaaacaggagctggacaacctggttatggtactcagcctggtatcggtggacagacgggatctggccagccaggttacggatctcagccaggtataggtggacaaacgggtgctggtttgcccggttatggaacacaacctggaattggcggtcaaaccggagcaggtcaacctggatacggcagtcaacctggagtcgccggacagacgggagctggtcaaccaggctacggtactcaaccaggtacgtcttc

SEQ ID NO: 2455 - DNA, 837 bp, synthetic construct
  misc_feature 1..837: note = Description of Artificial Sequence: Synthetic polynucleotide
  source 1..837: mol_type = other DNA
gaagacttaaggttatggttcgacgcagactgcaggcggtgattctgcactaacagcaggttatggttctactcaaacagccagggaaggtagtaatctcacagctggctatggctcgaccggaacagccggttcagattctagcctcatagctggttacggatcaactcaaacttcaggagaagattccagcttaactgctggatatggatctacacaaactgctcaagagggatcaaatttgactgctggttacggtagtaccggaacagcaggatcggacagctctttgatagctggatacggaagcacacaaacatcaggaggcgacagttctttaactgctggttacggctctactcagactgctcaggagggatccaatctcacttcaggttatggaagtactggcactgccggagctgattcaagtttgattgcaggatatggttctacccagaccagtggttccgactctgccctgaccgccggctacggatctactcagaccgcacaagaaggatctaatttaaccgctggatacggatcaactggaaccgctggcagtgattcttcgttgattgctggttatggatcaacccaaactagtggttctgatagttcgttgaccgcaggatatggttccacacaaactgcacaagaaggctcgaatttaaccgcgggctacggatcaactggtaccgctggtgttgattcttctctgatagcaggttatggatcaactcaaacatctggttctgattctgctttaacagcaggttacggatctacccaaactgcccaggagggttccaacctgacagcaggtacgtcttc

SEQ ID NO: 2456 - DNA, 471 bp, synthetic construct
  misc_feature 1..471: note = Description of Artificial Sequence: Synthetic polynucleotide
  source 1..471: mol_type = other DNA
gaagacttaaggtgctggattaaatgcaggagctggtcttaatgctggtgcaggtcttaacgctggagcaggcttaaacgctggtgccggactgaaagtcggtgcaggactaaatgcaggagccggtctgaatgtaggagcaggccttaataccggcgccagattttctgccaatgctggtttgaaggcttcagctggactaaatgctggtgccggtctgaacgctggcgcaggactcaaggtgggtgctggtctaaacgctggagccggactgaatgtgggtgctggtttaaacactggtgcaggtttaaacgctaacgcgggattgaaggctaacgctggacttaacgctggtgctggattgaaagttggagccggattgaacgtcggtgctggactaactgccggaactggtttaaatgccaacgctggactgaaggcaaatgctggtttaaatgcaggtacgtcttc

SEQ ID NO: 2457 - DNA, 612 bp, synthetic construct
  misc_feature 1..612: note = Description of Artificial Sequence: Synthetic polynucleotide
  source 1..612: mol_type = other DNA
gaagacttaaggtgtttgcggatgctcaggtggtcgacagctagttaatggagtttgcaaatgcacaggtggccaggaattggttggtggatcgtgtgcttgcacttgcggtcaagagttagtaaacggagtctgtacttgtccaggaggtcaaaaattggttggagacaaatgtatgtgtactggtggacagactatggtcaatgatgtttgtgcctgtactggtggccaaaccttggtggacggagtttgtgcttgtaccggcggccaaaagttggtcgacggagtttgtacttgcactggtggtagaagtttggtcgatggagtgtgcgcttgcacgggtggacagcttttcgctaacgacgtttgtgcctgcccagccttaatgtctctaaagaacggtgagtgctcctgtgacggcggtagagctgaagttcgccctgatgtctgcgagtgcacaggaggacaagagatcgcaaacggtgaatgtgcatgtacgggaggacaaactctcgtggatggtgtgtgccgctgcccttcgctcatgtcgctggaacatggtgtttgtacctgtgatggtggcaggactgaagttagcacaggtacgtcttc

SEQ ID NO: 2458 - DNA, 537 bp, synthetic construct
  misc_feature 1..537: note = Description of Artificial Sequence: Synthetic polynucleotide
  source 1..537: mol_type = other DNA
gaagacttaaggttccacaactacgtccggaaatggatctggcacctcatcaaccacgaccaacaatggttcgggtgccggctccaccactacctccggtaatgactccggagtgggttcgactactacctctggtaacggttctggagctgagagtaccactaacggcaatgatagtggagtgggctctacaacaacctcaggagctgcctcaacggctacgtcagccaatggtagtggcgccgagtctactaccactagtggaaacggttcaagctctggttccactactacaagtggtaatggctcgggtgcagcttcaactactaatggaaatgactctggtgtaggttcaacaacgaccagtggtgctgcctctactaccacgagtggtaatggatctggtgtcggttctacaacttctagtggtaacggttccggaaccggttcgacctcatctggtattggaagtaccacgacttctgtgaacggtagcggaacaggtactacaaccagctcgggtataggtacgtcttc

SEQ ID NO: 2459 - DNA, 489 bp, synthetic construct
  misc_feature 1..489: note = Description of Artificial Sequence: Synthetic polynucleotide
  source 1..489: mol_type = other DNA
gaagacttaaggtggtttgggagtgggaggactcggcgttggaggcggattgggtggcggatcgcattactcttcatcctcgtactcttctggtcatggatctggtgtaggcgttggagcaggattggcatcaggagctgctctcggcagtggtgcaggattagctaccggtgcagccctgggctccggagctggtcttgcaagcggagccggtctaggttacggtgcaggtcttgcttcaggagctgcacttggatctggtgctggtctagcaacaggcgccgcccttggaactggtgccggtcttgcctctggcgctgctctgggtagtggagcaggcctcgctactggtgcagctttgggttcaggagcaggactagctgctggtgctggactgggttatggcgccggccatgcctcgggagctgctctaggttctggagcaggactggcttctggagccgctttaggatctggaggtacgtcttc

SEQ ID NO: 2460 - DNA, 666 bp, synthetic construct
  misc_feature 1..666: note = Description of Artificial Sequence: Synthetic polynucleotide
  source 1..666: mol_type = other DNA
gaagacttaaggtactggtgtttctggaggtccaggttacccaggaaccgtcggagctggacagtaccctggtgtaggcggattgccaggaacttccggacagtacccgggtggccaatacccaggtactggtgccggaggagtcccaggatattctggttaccctggtactagcggagccggtcattacccaggaacgtcaggcacgccaggtgccggaacaggacctggaactggaggtattggtcagcatggtggccagctgtctaccggaactggcgccggcgtaggacatcagggtagtggcgtaggtcaataccctggtacgggtgctactggtggctacccgtatccaggtacaaccggtcagtaccctggaacttctggtatcccaggtgcaggtactggtcaatattacccaggtggtactggagtaggcggtctacctggtggtgttggtcaacacggaggacaattgtccacaggtgcaggaacaggactaggtcaacaaggtggaggagtcggtcaatatccaggaactggcgttggtggtggaccaggatacccataccatcatggtacttcaggtcagtatccaggtggacaataccctggaactggagctgctggaggcccaggatatacaggatacccaggtacgtcttc

SEQ ID NO: 2461 - DNA, 441 bp, synthetic construct
  misc_feature 1..441: note = Description of Artificial Sequence: Synthetic polynucleotide
  source 1..441: mol_type = other DNA
gaagacttaaggtccagctccatatccaacggccccaggtggtgtaggaaagattacctatccggtaggtccaggaggtgttccaggctaccctggaacccccacttatccatcaatccctggatatccaactcctggacacccagtaactgaaccgggataccctggcgtgccatcctatcctggcgctcctagaccaggtgtgccttctggtccatctggtccgagctaccctggtggtcaaattccaggatatcctggtgtcccttccccaggattcccaggaggacctccgcctggatacccaggagtgccaaccgctggttatccaggtattccaacaggcccaggtgttccgtcatacccaggtggaccttccgtgtcatttcccggagttccatcagtgcctccaggagttccgagttacccaggtacgtcttc

SEQ ID NO: 2462 - DNA, 645 bp, synthetic construct
  misc_feature 1..645: note = Description of Artificial Sequence: Synthetic polynucleotide
  source 1..645: mol_type = other DNA
gaagacttaaggtgcaccatcaccaggttaccctggtgccccaagttcaggataccccggtgccccgtcccctggatacccaggtgccccttctccaggatacccgggtgctccaagtccaggatatcctggagccccatacccaggttacccggaagctcccactccttcatatccaggagctccaactccaggttatcccggtgctcctagtccaggttacccgggagctccagctcctggatatccggaagcaccatacccaggttatcctggtgttccaagcccgggatatccaggagcgccatctccgggttatccaggtgcgccgtcccctggttacccaggtgctcctagttcaggatacccaggtgcgcctagcccgggataccctggcgctccatctcctggttacccaggagccccatctcccggatatccaggagccccttatccaggttaccctgaagctcctactccatcctaccccggtgctccgacaccaggttatccgggagcccctagcccaggatatccaggtgccccagctccaggttacccagaggcaccatatcctggttaccctggagtcccttcacctggataccctggtgctcctagcccaggttatccaggtacgtcttc

SEQ ID NO: 2463 - DNA, 816 bp, synthetic construct
  misc_feature 1..816: note = Description of Artificial Sequence: Synthetic polynucleotide
  source 1..816: mol_type = other DNA
gaagacttaaggtcttacaggtccagccggtcaggacggaaagcagggtccacagggtcctcgcggtttgacaggtcctgccggccaagacggaaagcaaggacctcagggaccaaggggattgacaggcccagctggtcaagatggtaaacagggaccacaaggtcctcggggtttgactggtccagctggtcaggacggtaaacagggtcctcaaggaccacgtggtttgactggtcctgccggacaggatggcaagcagggaccaagaggactgaccggaccggctggtcaggatggtaaacagggccctagaggtttgaccggtccagcaggtcaggacggtaagcaaggacctcaaggtccacgcggactgacaggtccagctggtcaagacggaaaacaaggaccacagggtcagcctggacaagttggtcctagaggtctacaaggtccccagggtccacgtggagataaaggagagactggaccacagggtccagcaggcaaagacggcgaggctggtgctcaaggtcctgtaggtccggctggtccgcaaggacctcgtggcgataaaggtgaaactggtcctcaaggacctgctggaaaagatggcgaaagaggtcctgttggtccagccggtaaagacggtcaaaatggaaaggacggattgcctggcaaagatggtaaggacggacagaacggaaaggatggtctacctggaaaggatggtaaggacggccaggatggtaaggatggacttccaggtaaggacggtaaagatggacagccaggaaagccagcaggtacgtcttc

SEQ ID NO: 2464 - DNA, 561 bp, synthetic construct
  misc_feature 1..561: note = Description of Artificial Sequence: Synthetic polynucleotide
  source 1..561: mol_type = other DNA
gaagacttaaggtgacaccggacctactggtcctactggcgcttctggtccttcaggtgagactggacctacgggaccaacgggtgtttctggacctagtggagaaacaggtccaactggacctactggtgcctccggtcctagtggcgacactggcccaactggtccaactggtgcttccggaccttcgggcgatactggccctactggtccaactggcgcaagcggccctagtggtgagacgggaccaacaggtccaaccggagcatccggaccttcaggcgagactggtccaaccggcccaacaggcgcatccggtccaagcggtgaaactggtcctactggaccaacaggtgcttctggtccatcaggagagactggtcctacaggtcctaccggtgtatcaggtccatccggtgatacaggaccaacgggaccaactggcgctactggcccttctggcgagactggtcctactggtcctaccggcgccactggtcctagtggtgaaactggtccgactggtccaactggagctactggcccttcaggtacgtcttc

SEQ ID NO: 2465 - DNA, 843 bp, synthetic construct
  misc_feature 1..843: note = Description of Artificial Sequence: Synthetic polynucleotide
  source 1..843: mol_type = other DNA
gaagacttaaggtaaccaaattcttgatcctcgtacgtgcgtttgtaagaagtgtattgctactgcctgtcctgataattcgcattattctttctctacttgtagatgcgaatgtccacaacaccagaagtgccctcatggtcagtactttaattccgagacatgcaaatgtggatgttcccctcatatcaaatgccacagtcctagggtcctgaacaaggatgcttgtaagtgtgaatgcccaaagaacgtacactgtttaccacctttaacttttgatgagagaacatgtgcatgccactgtccagaacaccactcccactgccctacaggtaagatttattcttacacagaatgcggctgtatttgctccgagaaagcttactgtcatcttcctagattttttaacaacgagacttgtaaatgcgagtgtaagggtgaaaggaactgtgtacatcctaaggtctactccgagacgaactgtaattgtcaatgtccagaagatgactactgtccgcggcataagaccattaaccctgaaacctgtgaatgcagttgtccagcagaactcagctgtagaagtccacaagtgctaaacgacaaaacttgcaagtgcgtgtgtccaccacatactagacgatgcccaccaggaaaggagcttgatgatttcacctgtgagtgtagttgtcctgaggttttttgtcctttgccgaagctgcaaaacccttatacctgtaagtgtgcttgccctgataccctgacctgtccttacggacaagttgtagatccagagaactgtcagtgttcctgtccaaaaaaactatcctgttcaggtacgtcttc

SEQ ID NO: 2466 - DNA, 507 bp, synthetic construct
  misc_feature 1..507: note = Description of Artificial Sequence: Synthetic polynucleotide
  source 1..507: mol_type = other DNA
gaagacttaaggtaatcaggatcatggttacggtgtcaggccattagtcgacggtcaataccgcggctctggtactaataacaaacttccgggtaaccagtatcaaggttatggtattacaccttctattgacggacaatacacttctagtggtacaaacaataagttgcctggaaaccaaaatcagggatacggaattaacccttccatagtgggtcaatatccgggattgggcacgaataataatttgccaggaaatcaggatcacggttacggcgttagaccattggttgatggtcaatataggggaagtggaacgaataacaagctgccaggtaaccaataccaaggatacggtattactccttctatcgatggtcagtacacctcctctggaacaaacaataaactgccaggtaatcaaaaccaaggctacggaattaatccttctattgtgggccaatacccaggtttaggcacaaacaacaaccttccaggtacgtcttc

SEQ ID NO: 2467 - DNA, 516 bp, synthetic construct
  misc_feature 1..516: note = Description of Artificial Sequence: Synthetic polynucleotide
  source 1..516: mol_type = other DNA
gaagacttaaggttcaggcggttcgggtgttcagcagagtggtaacgtaccatctggagttaatatcaatcaaattcaaccatcctatggacaaccgcacggtacactttacagtggtggaaccggtgtgcagcaaccaggctatgcatcttcgggtgaaaacttgaacccgattcaaccttcatatggtcaacctcacggtaccttaggtagcggtggctctggtgttcaacaaagtggtaatgttccttcgggtgtcaacattaatcagattcaacctacctacggccagccacaaggtaccctaggttcaggaggatcgggtgtccaacagagtggtaatgtaccgtcaggaggaaacttaaatccaatacaaccatcctattcccagcctcacggtacactgtatagtggtggtacaggtgtccaacaaccgggttacgctagttccggaggtaacttgaacccaattcaaccttcttacggtcaacctcatggcaccttaggtacgtcttc

SEQ ID NO: 2468 - DNA, 825 bp, synthetic construct
  misc_feature 1..825: note = Description of Artificial Sequence: Synthetic polynucleotide
  source 1..825: mol_type = other DNA
gaagacttaaggtggcgacctccctgataaacctattccaggtggtcaggaagaggttgaaagaccttggccagaaacgggagatcttcctgataagccgattgagactgatcagtttgataccacagctggacctagtttctgggataccactcattctgatcacactgagtcaatggaaatattcgaagttccaccgaatgagattgatgacggtggtgatctgccagacaaaccaatacctggtggacaggtggaacaaccaggaccaggcatcgacggtctgccagataagccaattgagacggatcctttcgacactactactgatggctccttttgggacacaacgcattccgaccataccgagcctatggaaatatttgaagtccctggttcagaaatcgatgatggcggagatttgccagataagccgatcccaggcggtcaggtcgagcaaccttggcctggtccagatgacttgcccgataaacctcttaacattgaccctagtgatacaacaactgattctagcttctgggatactactcactcagatcataccgtgccgatggaggtgtttgaggtcccaccaaacgagatcgatgaaggcggaggattaccagacaagcctataccaagtgatagagatcatgttgagcagcctgagcctgagactggtgacttgccagataaaccaattggaatcaacccttcagatactactactgattcttcattctgggatactacccactttgatcatactgtccctatggaaatcttcgaggttcctccttctgaaatcgacgaaggtacgtcttc

SEQ ID NO: 2469 - DNA, 1038 bp, synthetic construct
  misc_feature 1..1038: note = Description of Artificial Sequence: Synthetic polynucleotide
  source 1..1038: mol_type = other DNA
gaagacttaaggtggagttgtgccagtgatccctggaggaccaaatataccaggtggtcctggagatccaataggtcctggtggaccagttgaaccaggaactcctgaaggtccagacggtccgggaataccaggaggtcctaacggtcctggcggaccgggaattactgaaggtcctaatgagagtaatcatcttactactaagatcccaatcactactaccacagatagaaacggaggtggagtagttccagttttacctggcggtccaggtggtcctcgcaaaccaggtggtcctagtggcccaaatggccctggtaatcctggtggacctgttaatccaggtggtccgactggtccagatggacctggaaacccaccaggctctgagacaccaggaggttctggaacgcctattggacctaacggtccagttggaccaggatcaccggatggtccacgtggtccttcaggtcctgatggaccgaaaggtggcacacagaatacaggatcccctagtggtccttctggaccggataacccaaatggacctggaggcccatcgaacccaggtggtccgagtggtccaactggacctgaaggacctgacgaatccaatcggttatcgaccaaaattcccataacctcgaccaccacagatagggttggtggcggtattcctgtgattccaggtggacctaacattccaggtggcccgcgaggacctagcggaccgtccatccctggcgagccagcgggtcctgacggatcaggaggtcctggtggtccagttaatccgggaggtccgaccggtcctcatggtcccggaaatccacccggtccatctattccgggcggacctggaggacctgacggtccaggatcgccatcaggtcctagtggtcctgattctcctggctcgccaaatggtccttctaacacaggttcccctagaggtccatctggtccagatggtcctaaccagcaaccaacatctaaaccggagaagcaaaacgaacaatcttcaggtacgtcttc

SEQ ID NO: 2470 - DNA, 861 bp, synthetic construct
  misc_feature 1..861: note = Description of Artificial Sequence: Synthetic polynucleotide
  source 1..861: mol_type = other DNA
gaagacttaaggtaccaattctactgcaagcggagataattctacagcttctggaactaacgcttccgccaccggtgaaaactctactgcgtcgggtacgaatgcttctgctactggtgagaactctactgctactggaacagcctccacagccagtggttcaaactctactgctaacggtaccaactccacggcatcaggagagaatagcacagctaccggtacggatagcactgcttcaggaagtaattctactgctaatggtactaattctaccgcgtcaggagacaatagtacagcctcgggaactaacgcctccgcgacgggagagaactcgaccgctacaggaaccgattcaactgcatctggttctaactccactgctaatggcacaaattctactgcatccggtgacaattcaacggcctcgggcactaatgcgtctgcaactggtgagaacagcacagctacaggcactgactctaccgcttccggttctaattcgacggctaatggagctaactccacagcctcaggagataattccaccgcttcgggtacaaacgcctccgcaaccggtgagaactctacggctactggcactgattctactgctagcggttcaaatagcacagcgaacggaactaatagtactgcctcaggtaacaattctacggcaagtggaacaaatgcatccgcaacaggtgaaaattctacagcaaccggaacggactcagcagcttccggtacaaactcaacagctaacggtactaacagtactgcctcgggagataactcaactgccagtggtacaaatgctagcgctaccggcgaaaattctactgctacaggtacgtcttc

SEQ ID NO: 2471 - DNA, 771 bp, synthetic construct
  misc_feature 1..771: note = Description of Artificial Sequence: Synthetic polynucleotide
  source 1..771: mol_type = other DNA
gaagacttaaggttcgggattgagtggagtttctatggctggtagcgaatgttctggagcatcaatggctggatcgggtcattctagagtctcagtcgcaggatctgagtatactggtgcttcgatggcaggcagtggtcatagcagagcctcaggagcaggatctgaatggagtaggactagcatggccggttctggactctcaggcgtttcagtcgccggttctgagtaccctggagctagtatggctggttccggtcactccggtgcccctgtttcaggtagcggatcctccggagcaagcatggcaggatctggactttctcgtgcctcaggtgccggatcagaatgttccagaacatcggttgctggctcaggtcattctagaacgtctgtagctggatccgaatgttcacgggtttcacgagcaggtagcgaatgctccagggcttcggttgccgattctggatactctggagcatctgaggtaggttcaaggtcaagcagagcatctcttgctggattagtacacttcggagcttctattgcatgcagcggtcattctgaagcaagtatggaaggtttggaatgttccggcgcctccgttccagactcaagacattctgtcgctagcgtaacggatggtggtcactctgtagcttccgttgctgactcagtgcatagtgttgttagtatgactggtttaggacagtttgtgtcctccgtttctgaacctggtcatagtactgcctctgttgcaggtacgtcttc

SEQ ID NO: 2472 - DNA, 477 bp, synthetic construct
  misc_feature 1..477: note = Description of Artificial Sequence: Synthetic polynucleotide
  source 1..477: mol_type = other DNA
gaagacttaaggtattgcaactccgagtgataccaactcttatgagtccaccactacagtgactgacatgaccacgtcaacacataccactgtcgttactacaacctggttggtgacaaatagtgacggctctgttgaaaccgagacgggaatcgcgacaccttccgacactaatagttatgaaagtaccactaccgttaccgacacaacctttactacggaaacaaccgttatcactaccacttggttagtgacgaagtccgatggttccgtcgaaactgaaactggtgtgattactcagtcgggtgattcaagtagcactatcactacgtttgagacatcaagtgacacgaacagttacgattcaacaactactgttacggatactaccacaacaacggaaactactgtttttaccaccacatggatcgttactaaatcagatggcagcgtcgaaacagaaacaggtacgtcttc

SEQ ID NO: 2473 - DNA, 1101 bp, synthetic construct
  misc_feature 1..1101: note = Description of Artificial Sequence: Synthetic polynucleotide
  source 1..1101: mol_type = other DNA
gaagacttaaggtgaacctactggtagcggttctgaatccaccggagaaccgaccggagagccttctggatcaggatctgaatccaccggtgaaccaactggagaacctacaggagagccatctggttctggatcggaaagtactggtgagccaactggtgagccatctggttcaggttctgaatctgctggtggatccagcactccaggatattctgtttctactaccactgatactactacaactacagagacaaccaccactactactaccaccacatggactgttactaagtcagatggaagtgtcgaaacagaatccggtattgttagtggctctgatagtagtctgacgacaatcactacatttgaaccaccatcgagttcctctggatttggtactgaaagcggcctgattacggatacgaacaacgagtcatctgcgggatctactggtggcgcctccgagccgactggaggtgcctcggagtccaccggtggagctagtgagcctacaggagaacccacaggtggagcctccgaaagcacaggtggtgcatcggagccaaccggtgaaccaagtggtggcgcctcagaaagtactggaggagcaagtgagccaaccggagagccaactggaggtgcaagtgaatcaactggtggtgcatctgaaccaactggtggtgcttccgagagtacaggaggtgctagtgaacctacaggaaacggttccgaaagcacgggtgaaccaactggcgagccgacaggtggtgcctcagaatctactggaggagctagtgaaccaacgggagagccaacgggtggcgcttctgaatctaccggaggtgcatctgaaccgactggagaacctactggaggtgcttcagaaagcaccggaggagcttccgagcctactggagagccaaccggaggtgctagtgagagtactgatggtgcttcggagcctactggtgaacctacaggaggagcttctgaatcaacgggaggtgcttcagagccaaccggtgagcctactggtaacggctccgagactactggtggatcttccactccaggatactcagtatcaggtacgtcttc

SEQ ID NO: 2474 - DNA, 654 bp, synthetic construct
  misc_feature 1..654: note = Description of Artificial Sequence: Synthetic polynucleotide
  source 1..654: mol_type = other DNA
gaagacttaaggtgataatggaactggatcaggtaacaccggtgataatggtacgggctccggcaacacaggagataatggtaccggatccggcaacaccggcgataacggaactggttcgggaaacaccggagacaacggtacaggtgctggcgacaatggtacaggtgctggagataacggcactggttctggtaacactggagataatggcactggatctggtaataccggtgacaatggcactggttctggcaacacaggtgataacggcacgggatccggaaataccggtgacaacggaaccggtgctggtgataacggtactggagctggagacaatggtaccggaagtggtaacacaggagacaacggtaccggatccggcaatacaggtgacaacggtactggttctggaaataccggcgacaatggtaccggtgctggtgacaatggcaccggagccggtgataacggaactggatctggaaatacaggcgacaacggaactggtagtggaaacacaggtgataatggaacaggtgcaggagacaacggaacaggatctggtaatacgggtgacaacggaactggcgctggcgataacggtacaggttccggtaacactggtgataacggaacaggtacgtcttc

SEQ ID NO: 2475 - DNA, 714 bp, synthetic construct
  misc_feature 1..714: note = Description of Artificial Sequence: Synthetic polynucleotide
  source 1..714: mol_type = other DNA
gaagacttaaggtgcccaaggtccacagggtgttcagggtgtccaaggtgatcaaggtcctcaaggtgttcaaggtgctcaaggcgaccaaggaccacaaggcgttcaaggagttcaaggagatcaaggacctcagggcgtgcagggagtacaaggtgaccaaggcccccagggtgttcaaggtgttcagggtgatcagggacctcaaggcgtgcagggtgttcagggagatcaaggtccacagggcgttcaaggagcccaaggtgaccagggtcctcaaggtgtgcaaggagtgcaaggtgatcagggcccccaaggagtccagggagttcagggtgaccagggtccacaaggagcgcaaggtgtgcaaggtgatcaaggaccgcaaggagtacagggtccgcagggtgatcagggtccacaaggtgtccagggtgttcaaggagatcagggaccacaaggtgttcaaggagtgcaaggtgctcaaggtcctctgggtcctcaaggtatccaaggtccgttgggagcacagggcccattgggtcctcaaggtgctgagggtccattgggtgcccaaggccctcttggccctcaaggtgcagagggtccactaggagctcaaggcccattgggtccccagggtgcagaaggtccccttggtgcacaaggtcctcttggtccacagggtgctgaaggtccattaggtacgtcttc

SEQ ID NO: 2476 - DNA, 1023 bp, synthetic construct
  misc_feature 1..1023: note = Description of Artificial Sequence: Synthetic polynucleotide
  source 1..1023: mol_type = other DNA
gaagacttaaggtataggaggaatcccaggcgctgtacctggtactggactgggaggcgttcctggactcacccctggtggaggcgccgtacctggtgttgtgccaggtcttgtgcctggagctggtggtgttcctggtgcaggtataccacaacttggagtacaaccaggtgccaaagcctctaaatacggattgcctggagttggaggtgtgccaggtgtcggaggtgttccaggtgtaggaggtgtgcctggcgttggtggagttccaggcgttggtggcgtcccaggtgttggtggtgtcccaggcgttggaggtgttccaggaccaactatttctggactaggtgcaaaaccaccaaagataggtggagtcggtgccggaggttttccagctggagtgggcgtcggaggtgtcccaggtgccggtgcttaccctgctggaggtaaacctccaaaaccaggatatggagctggagctggactgattccaggaggtggtattactcctggagctggcttgggtgctggtcttgttcctggagctggaacaggagctggactctaccctggaggtaagcctcctaaacctggatatggcttgccaggcggtgcacttacaccaggagcaggactgcaaccaggcgccggtttgcagccaggtgctggactgcagccaggagcaggattgcaacctggagccggcttgcaacctggtgcaggcctccaacctggagcagcaactggtgccggtacatacccaggaggtaaaccacctaagcctggtcttggtattggcggacttacacctggtgttgctggtctaggaccgggtgccggactggtgccaggagcgggaggtttagctccaggtgccgccggaggtgcataccctggaggaaaacctccaaagccgggcgccggcttagttcctggtgccggaggcctcgctccaggagctggaggtttggctccaggcgccggtggccttgttccaggtgccggcggattaggtacgtcttc

SEQ ID NO: 2477 - DNA, 897 bp, synthetic construct
  misc_feature 1..897: note = Description of Artificial Sequence: Synthetic polynucleotide
  source 1..897: mol_type = other DNA
gaagacttaaggtggaatcgcaacgggcgttgctccaggtggagccggtggtctgtacccaggtgcaggaggaaagccaccaaaacctggatacggtccaggagctggttttgtgccaggtgcaggaattggtgccggcgccggagctggattacaacctggtggaatcggagcaggagttgctccgggtggtgtcggagctggtggactctatccaggagccggtggaaaaccacctaagcccggttatggacctggtgctggttgggtccctggtgccggagttggcttgggtactggagtccagccaggaggtactggtacaggcgttgccccaggaggaatcggcgctggcggactttatcctggtgcgggaggtaaacctcctaaaccaggatacggacttggcgccggattagtgccaggagctggtgtgggtcctggagctggtctgcagcctggaggcatcggtgccggtggtgtcggagccggtggattgtacccaggtggtaaaccacctaagccaggatacggacctggtgcaggttacgttccgggtgcaggttatgtaccaggtgcaggagtcggtcctggagccggtctacaaccaggaggcattggtgctggtgttgcccctggtggtgttggcgctggaggtttgtacccaggaggtaaaccacctaaaccaggttacggacctagagccggactgggtacaggcgctggtatcggcgctggactccagccaggcggaattggagccggagtggctccaggaggtgttggtgctggaggactatatccgggtggtaaaccacccaagcctggatatggtccaggtgccggttttgtcccaggtgttagcaatggagctggacagcaaccaggtacgtcttc

SEQ ID NO: 2478 - DNA, 777 bp, synthetic construct
  misc_feature 1..777: note = Description of Artificial Sequence: Synthetic polynucleotide
  source 1..777: mol_type = other DNA
gaagacttaaggtggtccaggtggagcaggaggccctggtgttgatgcacacggtcgacctactggtggctctggtacaggaggacctctggtagatgcatacggacgacctatctcaggtggtcatggtggtagacccgccggtggctcaggaacttcgggtggaccaggtgtcgacgctcatggtcgtcctattggtggtagtggaaccggaggtatcgacggtcaaggtcgtccatccggaggtaccgctgtggacgcctacggaaggccgattggtggtccaggaaccggatcaccaggtagcggtggtgcaggtaccggagttcctggtgtagatggtagaggcagaccttctggaggtccaggagtggatgcccatggtcgaccaattggaggtacgggagcaggcggtcctggtacaacaggtactggcaccggtggtggagttgatgcttatggacgtcctatcggaggtcaaggtactaatggtcacgacgcaaggggacctccagtcgattcacatggacgtcctattggaggtcctggaactggaggattaggttccccaattggaaccggtatcggcggtgttgacgcctacggtcgtccttctggacctggcggacaaggatctggtaccccaggaggtgcacctggtcactcgggactaggtacaggaggtcacggtgtagatgctcacggacgacctattggaggaccgggtacgggcgtctcaggtgttgatgctcatggacgtcccataggtacgtcttc

SEQ ID NO: 2479 - DNA, 750 bp, synthetic construct
  misc_feature 1..750: note = Description of Artificial Sequence: Synthetic polynucleotide
  source 1..750: mol_type = other DNA
gaagacttaaggtgtcggccagtatccttctggtacaggtgccggtcaatacccttcaggtactggtgcaggacaatacccttcaggaaccggaggaacatctggtactggtcagtatcctggtggtactggtgccggacaatatccaggtggcattggcggaaccggtggcgtgggtcaatacccaggtagtaccggaacaggtcagtatccaggaggaactggcggtacaggtggtgctggtcagtatcctagcggcacaggtgctggacagtatccatctggtactggtggtaccggtggtgcaggacagtatcctggttcaaccggtgttggacagatacctggaggaacaggtcattatccatccggcacgggtgctggtcagtacccttccggaacaggaggtaccggaggtgctggacaataccctggatctacgggtgctggtcaacatcctggaggccttggtggtacaggtggtacgggacaatatccatctggtaccggtgcaggccagtacccatccggtactggaggtactggtggagcaggtcaatatcctggttctggacaatacccatcaggtactggaggtaccggttctgctggtcaatatcctagtggaactggcggagcaggacaatatcctaccggaacgggtggagccggaggagtaggacagtacccttctggcaccggcgctggtcaatatccaagtggcactggcggaattggaggtacgtcttc

SEQ ID NO: 2480 - DNA, 684 bp, synthetic construct
  misc_feature 1..684: note = Description of Artificial Sequence: Synthetic polynucleotide
  source 1..684: mol_type = other DNA
gaagacttaaggtattggtggccagacaggtgcaggtcaaccaggttatggtagccaacctggaattggtggtcagacaggcgctggtcaacctggatatggatctcaacctgttgttggtgctcaaacaggcacaggacagcctggttatggagctcaaccaggtgtcggtacacaaactggtgctggtcaaccaggctatggttcacaaccaggtatcggaggtcaaacaggtgctagacaaccaggttatgtcacccaacctggagtcggtgctcaaactggaatcggacaaccaggttacggagctcaacctggtattttaggacagactggtgctggacaaccaggatatggttctcagccaggtattggcggacagacaggtgctggacagcctggttacggcacccagccaggagtgggtgctcaaactggcaccggtcaacccggttatggcgcccagccgggtgtgggtacgcagacaggcgcgggtcaaccaggatacggaagtcagcctggtattggaggacaaaccggagccggacaacccggctatggaacacagccaggtgtgggagctcaaactggtgcaggccaaccaggctatggagcacagcctggtgttggtgcgcagactggtgctggccagccaggttacggttcgcagccaggtacgtcttc

SEQ ID NO: 2481 - DNA, 789 bp, synthetic construct
  misc_feature 1..789: note = Description of Artificial Sequence: Synthetic polynucleotide
  source 1..789: mol_type = other DNA
gaagacttaaggtatcggtggacaaactggaggtggacaacctggatatggttctcagattggcggtcagactggtgccggtcaaccatcatatggttcacagccaggagtgggcgctcaaaatggagctggtcaacctggatacggaactcaacctgtgattggtggacaaacaggcgctggacaaccaggatatggcggccagacaggagtgggtggaagccctggttttttgacccaaccaggcattggtggcatttctggacctatcggtggaaagttaggcggtggtcaaagcgaggcagcaaagccaggatattgggcacagccaggaattggtggaccatccaggtacggatctcaaccaggtatcggtgatcagactggtaccggtcaatccggatacggtggtcaaccaggaatatctggacaaacaggaggtggacaaccgggttatggaggccaagctactatctccggtctgcctggatacggtacacagccaggtatcggtgccttgaccgcagttcctggtggtcattatggttacgagactcaacctggtattggtggccagactggaacaaaccagcctggttttggtggtcagcctggaataggtggacaaaccggagcgggacaacctggttatggtttcatcggtcaaccgggtattggaggacaaaccggaacctccggtcgccagccaggttacggtacacagcctggtatcggtggtcagactgcagccggtcaaccaggatacggctctcaaacaggtacgtcttc

SEQ ID NO: 2482 - DNA, 777 bp, synthetic construct
  misc_feature 1..777: note = Description of Artificial Sequence: Synthetic polynucleotide
  source 1..777: mol_type = other DNA
gaagacttaaggtgctgatggtgctgatggtgtggatggagttgatggattaggttggactggtggttcctatgaccctcttaccggcgtcgttactttcacgtctgatgacggcttgggttttgttacaggtgacttaaggggagctgatggtgccgatggtgtagatggtgttgatggtgccgttggacctcagggtccagagggtccacaaggattgcaaggagacactggtccacaaggacctcaaggcctccaaggtgagcaaggacttcaaggacctcagggtctacctggtgccgacggagccgacggagcccaaggaccgcaaggaatccaaggagagcaaggtttacagggtcctcagggtttacctggtgccgatggagctgattctaccgtccctggtcctcaaggccctaagggagacaaaggtgatactggtgacgctggtccacagggacctaaaggcgatactggcgacgctggtccacaaggtttgaagggtgatcctggaaatgatggagctgacggcgctactggacctgaaggacctcaaggtccacaaggaaacccaggcgctgatggcgctgacggagcccagggacctaaaggtgacaagggcgacacaggagatccgggagcacaaggtcctcaaggcaatccaggtgaccagggaccacaaggaaatccaggagcagacggagcggatggagctattggccctgagggtcctcagggtccacaaggaccagagggaccagaaggtacgtcttc

SEQ ID NO: 2483 - DNA, 954 bp, synthetic construct
  misc_feature 1..954: note = Description of Artificial Sequence: Synthetic polynucleotide
  source 1..954: mol_type = other DNA
gaagacttaaggtccatacggctcctccttgggatactccgccttttatggttctagagtcggtccctttggcacttacggtacgagcggtctgtttggctctggatacggtccgtttggccatttaggaccttacggtagtgctttgggatactctggtctatatggatcaagactgggtccatttggaacctacggtacaagcgctctatacggatctggatatggaccttttggtcatttaggaccatacggcagtaccttgggatactcaggactctacggtagtagattgggaccatttggtacgtatggcacgtccggtgtattcggttcaggttatggtcctttcggacacttaggaccttatagctcaacacttggatattctggtttgtacggatcaagactgggaccattcggtacctacggtacttccgcattgtatggatccggttatggaccattcggacacctaggaccttacggatcaactttgggctatagtggcttgtattcctctcgtttgggcccatttggaacttacggaacaccgggtcttttcggttctggatatggtccatttggtcatttaggtccatatggatctacgttgggttactccggcctatacggtagcggtctaggcccatttggaacatacggcacatccttattcggttctggatacggtcccttcggacaccttggaccatacggtagttccctgggctattcaggactttatggctcaagtttaggtccttttggtccttacggaaccagtggtctttttggatctgtctacggcccttttggtcatttgggtccctatggatcgactctaggatattccggattgtacggttcccgcttaggtcctttcggaacttatggtacttcaagtttatatggttccggatacggcccttttggccctctaggtacgtcttc

SEQ ID NO: 2484 - DNA, 675 bp, synthetic construct
  misc_feature 1..675: note = Description of Artificial Sequence: Synthetic polynucleotide
  source 1..675: mol_type = other DNA
gaagacttaaggtccatccagtggcgcaagtggacactctggaccatcctccggtgcctcaggccatagtggaccatcctcaggtgcatctggtcacagtggcccaagtagcggtgcttcaggacattctggacctagttctggagcatctggacatagcgttacgtcgtcgcataccggaccttcgagtggtgcctcaggtcactccggtccctcttcaggagcctcgggtcactcaggcccatcttctggtgcttccggacacagtggaccctcatctggtgcatctggccactcagtgacgtcaagtcatacgggtccttctagtggtgcaagtggacatagtggaccatctagcggtgcctcaggacactctggaccttcttcgggagcttccggacattctggcccatcatctggagcgtcaggtcattctggtccttcatcaggagcctccggtcattcgggaccatcctcgggtgcctccggtcattctgtaacctcttctcacacaggtccatcttctggtgcatctggtcattccggaccatcgagcggtgcttctggtcattcaggtccatcgtcaggagctagcggccactctggtccaagcagcggagcttccggtcacagcggcccatcatccggtgcttctggacactcaggtacgtcttc

SEQ ID NO: 2485 - DNA, 846 bp, synthetic construct
  misc_feature 1..846: note = Description of Artificial Sequence: Synthetic polynucleotide
  source 1..846: mol_type = other DNA
gaagacttaaggtataggtggaggccaacctggaattggtgttcaacctggatatggaggacaaactggtggccaaccaggatatagaggacaaactggaacaggaacaggtcaacctggttatggtggtcaaaccggaataggtggaggtgcaacccaaccttcgtacgctcaaactggtggacaacctggttacggtggaggtcagcaggtccaaccaggatatggtggacaaacaggagccggtcagcctggatatggaggtcaaatcggaacaggtcagcctggatacggcggtcaaactggtataggaggtggtcaaccgagtactggtattcagcctggctacggagcccagcccggctacggaggccagaccggaactggaactggccaaccaggttatggaggtcctgcgggcactggtcctggtctaccaggctatggtggacaaactggtactggtgcaggtcaaccaggatttggtggtcagactggagccggtcaacctggttttggaggacagaccggaactggtgtgggccagccaggttacggcggccaagctggaacaggacaaccaggttacggaggtcaaactggaggtcagcctggttatggaggtcagactggcactggcacaggacaaccaggatacggtggccagactggaattggtggtggacagcctggttacggtggtcagacaggaacaggaaccggcaagcctggttatggtgagcagaccggtacaggagcagctcagcctagctacggacaaacagctggccagcctggctatggcggtggccttccaggacaacttgtccaaccaggtacgtcttc

SEQ ID NO: 2486 - DNA, 498 bp, synthetic construct
  misc_feature 1..498: note = Description of Artificial Sequence: Synthetic polynucleotide
  source 1..498: mol_type = other DNA
gaagacttaaggttacactccatctggtaagagttctgagtccagcatgaacacagcttcgtctgagagttcgatgaatacggcgagctcagagagttggataaagactgcctcctccgaatcttctatgaacactgcctcttccgaatcgtctatgaatacagcttcttcagaaagttggatcaatactgcttcatccgaatcttcaatgaacactgctagctctgaatcctggataaacactgccagtagtgagtctagtatgaattcggcgtcgtcagagagttggatcaatacagcttctagtgaatcctggatgaacactgcttcatcagagtcttggattaacactgctagttcagaatcgtccatgaacaccgcgtcatctgagtcctggataaatacagcttcaagtgagagtagtatgtccaccgcttcttccgaatcttggattaatacggcatccagtgagtccagcatgtctacaggtacgtcttc

SEQ ID NO: 2487 - DNA, 867 bp, synthetic construct
  misc_feature 1..867: note = Description of Artificial Sequence: Synthetic polynucleotide
  source 1..867: mol_type = other DNA
gaagacttaaggtacaacaacgtacagagtttcaggtagttcctcggcttcctccgacgtcccaccagtatatactacaacagtcacatcaggaagctcaaccgagactgacgttgtgagtgaatatagtacaaccgactctaatggaatgcctagtacgggtactactacataccacgttagtggatcttcatccgcgagtagcgacgtacctcctgtatacaccacgaccgtgacatcgggttcctctactgagactgatgtcgtatctgaatactccacgacagacagcaacggtatgccatctaccggtacaacaacttatcacgtgagtggttcatcctctgcttcatctgacgtacctccagtctacactaccactgtaactagtggttctagtactgaaacggacgttgtttctgaatactctacaactgattcgaatggtatgccttccacaggtactacgacatatgaagtaactgacagttgccctgattgttctactggagctccgtcgcatagaagtaatgaggtcagctccatgccgtctagttttgctacctcatccatgagttctatttcccctgccacttccagtggtatgcctccagtctatactaccacagtcacatcgggatcatctactgaaactgatgtggtttctgaatacagtacgactgactccaatggaatgccgtctaccggtaccacaacgtatcacgtttctggctcaagttcagcctccagcgacgtcccaccggtctacacaactaccgtaacgtcaggttcttcaacagaaactgacgttgtatctgagtacagcactactgactcgaacggtatgccttcgacaggtacgtcttc

SEQ ID NO: 2488 - DNA, 681 bp, synthetic construct
  misc_feature 1..681: note = Description of Artificial Sequence: Synthetic polynucleotide
  source 1..681: mol_type = other DNA
gaagacttaaggtacgtacccaccaggacaggccccccctggcacttatgctccaggacaaggtccacctggaacttaccctccaggacaaggaccacccggcacctatgcgccaggacaaggacctcctggaacttatccacctggccaaggtccaccaggaacgtatgctcctggacaaggtccaccgggcacctatccacctggacaaggacctccaggtacctatcctccaggacagggtcctgctggaacttacccaccaggtcagggtcctccgggcacttacccgccaggtcaagctccacctggaacctacccccctggacaaggtcctccgggtacttatttgcctggccaaggaccaccaggtacatatccacctggtcagggaccgccaggcacttatcagccaggagagggtgctcctggaacctatcagccgggtccaggtgcaccaggtacatacgcacctggtcagggtcctccaggaacttaccctcctgaacagggccctccaggtacttaccctcctggacagggtccggcaggtacttaccccccaggtcagggtccaccgggtacttatccacctggacaggcacctccgggtacctatcctcctggacaaggaccacctggtacttacttgcctggtcaaggtccaccaggtacgtcttc

SEQ ID NO: 2489 - DNA, 834 bp, synthetic construct
  misc_feature 1..834: note = Description of Artificial Sequence: Synthetic polynucleotide
  source 1..834: mol_type = other DNA
gaagacttaaggtctgttgggtggataccctggattaggaggtttgtctagtttatacggaggatacccaggtctgttgggtggactgagcggtttaggtggacctcttggcttaggcagatatcctggattgtcaggactatatggaagatacggaactctgggttccttgagttcactgtatggtggctatcctggttacggtggactttccggtctattgggttcttatgctggtcttggaggcctatctaccctttatggtggttatccgggactgctaggtggtttgtcaggagtcggaggaccattcggtcttggccgttaccctggtctaagcggtctttacggacgatacggtactctgggatctctaagcacactttacggaggatatccaggatacggcggtttgtctggtttgctaggtggttatcctggattaggtggtttaagcggactgtacggcggttaccctggcgtcttaggaggtttaagcggtttaggaggtagattgggtcttttgggacgttaccctggactaagcggcctctatggtggttacggaactttgggaagcttatctactttgtacggtggatatccaggcttaaccggcgtatcctcgttgtacggtggttacagcggtgccctgggtggattgtctggattgggtggtccactaggagtcttaggccattacccaggattgtactcgtcaggtctgggcagccttggattattaggtccttacggttcatctcttggttactcagccctatacggatccagagtaggacctttcggtccatatggcacttcaggtacgtcttc

SEQ ID NO: 2490 - DNA, 840 bp, synthetic construct
  misc_feature 1..840: note = Description of Artificial Sequence: Synthetic polynucleotide
  source 1..840: mol_type = other DNA
gaagacttaaggtttgtttggatcagtctatggacccattggacacttaggaccgtacggatctactcttggatactccggattgtatggatcgtctctaggaccatttggaacatactccacgtccggcctgttcggatcaggttacggtccttttggtcatttaggtccttatggatctaccttaggttattcaggtttatatggttctaggttgggaccgtttggaacatacggcacatcatctctttatggaagtggatatggtccattcggtcaccttggaccctatggttcaactctgggttactcaggcttgtatggaagcagattgggacctttcggcacttatggtacttctggtctttttggaagtggttacggaccatttggccacttgggtccatacggatccactttgggttattcaggagtgtacggttcgagattaggtccttttggaacttatggaacaagcggtttatttggaagtagttacggacctttcggtcatctcggcccatatggctctacgttgggatattcgggcctgtacggatcatctctgggaccgtttggtacatatagcacctctggcttatttggctccggatacggaccatttggtcatttgggaccttatggaagcacactaggatactctggtctatacggttctagactgggaccattcggtacatacggtacatcttcattgtacggttcgggatatggccctttcggacctctgggtccttacggttctaccttgggctattcaggtctatacggatccagtgttggaccattcggaacttacggaacttcaggtacgtcttc

SEQ ID NO: 2491 - DNA, 693 bp, synthetic construct
  misc_feature 1..693: note = Description of Artificial Sequence: Synthetic polynucleotide
  source 1..693: mol_type = other DNA
gaagacttaaggtcagggttctccaggatctggtcagcctggttctggacacccgggcagtggtcaaccgggtagtggctcacctggtagtggacaaccaggatcaggatcccctggttccggacaaccgggtagcggttctcctggaagtggtcaaccaggttcaggcagtccaggttctggtcaacctggttattaccaaccaggatcacaaggccaacctggtaacggtcagcctggatcaggacagcccggctctggacaacctgagagtggacaacctggtaatggccaacctggttcaggccagcctggatcaggtgaacctggatctggtcaacctggatattatcgacctggtggtaagggacaaccaggaaacggacaaccaggatccggtcagcctggtagtggagaaccaggatcgggccaacctggttccggtcaaccaggctattacaggccgggaggtaagggtcagcctggtaatggtcaaccgggttctagtcaaccgggtagcggagaaccaggttcgggacaaccaggatctggtcaaccaggctactatcgtccaggtggcaagggtcaaccaggcaacggacagcctggatctggacaacctggtagcggagaacctggtagctcacagccaggttctggacagcctggatactatagaccaggtacgtcttc

SEQ ID NO: 2492 - DNA, 741 bp, synthetic construct
  misc_feature 1..741: note = Description of Artificial Sequence: Synthetic polynucleotide
  source 1..741: mol_type = other DNA
gaagacttaaggtcaaggtatgaggccaggtcagggcatgggaccatcccaaggtatgggtcctggtcaaggtatgggacctggtcaaggaattggtcctggtcagggaatgggccctggtcaaggagtgggcccaggtcaaggcattggtccaggtcaaagtgtaagacctggccaaggcatgggtcctggacaaggtatgggtccaggccagggcgtaggtccgggtcaagagatgggacctggacaaggaattggtccaggacagggaatgcgccctggtcaaggtgtgggccccggacaaggtatgggccatggacaaggtatggaacctggtcaaggaatgggcccgggtcaaggcctaggtccaggacagggtgttggaccgggtcaaggaataggttccgagcaaggtatgggccctggccaaagcatgggtccaggacaaggaatgggtcctagacaaggaatgggcccaggtaaaggtttcggttctggacaaggtattggtccaggtcagtcaatgggtcccggacagggaatgggaccaggccaagatgttggacccggacagggaatcggttcaggacaaggcataggtccaggtcaaggaatcggtcgtggtcaagttcttggtcctggacaagttattgagccgggacagggtctaggacctggacagggtattggaccaagccagggtatgtcccctggccaactgatgggtccaggtacgtcttc

SEQ ID NO: 2493 - DNA, 633 bp, synthetic construct
  misc_feature 1..633: note = Description of Artificial Sequence: Synthetic polynucleotide
  source 1..633: mol_type = other DNA
gaagacttaaggtgaaggtgaagaaggtgaagataaggacaacaccggagagggagaggaaggtgaggacaaagacaatactggtgagggtgaagaaggcgaagataaggataatactggagagggtgaagagggagaagataaagacaacaccggtgaaggagaagagggcgaggacaaggacaacaccggagaaggtgaagaaggcgaggataaagataacacaggtgaaggagaagaaggcgaggacaaagacaacactggtgaaggtgaagagggtgaagataaggataatacaggagagggtgaggagggtgaggataaggataacaccggtgagggtgaagaaggtgaggataaggacaacacaggtgaaggagaagagggtgaggacaaagataatacgggagaaggagaggagggagaagataaagataataccggtgaaggagaggaaggcgaggacaaggataacaccggcgagggagaagaaggtgaggacaaggataatacaggcgaaggcgaagaaggagaagataaggacaataccggtgagggtgaggagggtgaagataaagataacactggcgaaggagaagagggagaggacaaggataacacaggtacgtcttc

SEQ ID NO: 2494 - DNA, 588 bp, synthetic construct
  misc_feature 1..588: note = Description of Artificial Sequence: Synthetic polynucleotide
  source 1..588: mol_type = other DNA
gaagacttaaggtgaaggtgaagaaggtgaggaaggtgaagataaggacaacacgggagagggagaagaaggcgaggagggcgaggataaggataacactggcgaaggtgaggagggtgaagagggagaggacaaggataacacaggcgaaggagaagagggagaggataaagataacactggcgagggtgaggagggtgaggacaaagataacactggtgaaggcgacgaaggtgaagataaagacaataccggagaaggagaagagggtgaagagggtgaagataaggacaataccggcgaaggagaagaaggagaagataaagacaacacaggcgaaggcgaggaaggtgaagaaggtgaagataaagataatactggagagggcgaggagggagaggagggcgaagataaggataacactggagaaggcgaggagggcgaagaaggtgaggacaaagacaatactggagaaggagaggagggagaagataaggacaacactggagaaggagaggaaggagaggataaagacaatactggcgagggcgaagagggagaggataaggataatacaggtacgtcttc

SEQ ID NO: 2495 - DNA, 384 bp, synthetic construct
  misc_feature 1..384: note = Description of Artificial Sequence: Synthetic polynucleotide
  source 1..384: mol_type = other DNA
gaagacttaaggtcaacaaaaaaattctgagcagcaaaaaaacaacgaacaacagaagaactcagagcagcaaaagaacaatgaacagcagaagaattcggagcaacaaaagaactccgagcaacagaagaataatgagcaacagaagaataacgaacagcaaaagaacaacgagcagcagaagaataacgagcaacagaagaacaatgaacaacaaaagaataacgagcagcagaaaaacaatgagcaacaaaaaaataacgaacaacaaaagaactctgagcagcaaaagaataatgaacagcaaaagaacagcgaacagcaaaaaaataatgaacaacagaaaaataatgagcaacaaaagaacaatgaaggtacgtcttc

SEQ ID NO: 2496 - DNA, 1083 bp, synthetic construct
  misc_feature 1..1083: note = Description of Artificial Sequence: Synthetic polynucleotide
  source 1..1083: mol_type = other DNA
gaagacttaaggtttgccaccaggtagtattcctccattgaggccaccaaatcaaggtggccatccacctggttcccagaagcctccgaacgtcggaatctacccgccatccactggttggatccctccttttggtcctcttacacaaggtggacacccacctggatctttattgcctcctaacacaggactaccaccaggttcgataccacctcttggaagcccgaaccagataggacatcctccaggctctcaaaaacccccaaatgttggtatctacccaccttcaactggatggactccaccatctggtcctttgacgcaaggaggacaccctccaggatctctgttgccacctaacactggattgccacctggatctatcccacctctgggctcccctaatcaaatcggacatcctccaggttcacaaaaaccaccgaacgtaggaatatatcccccatcaaccggttggattccaccttcaggtcctcttacccaatccggtcatccccctggtagtttgcttcctcctaatactggtttgccgccaggctctattcctccattacgtcctccaaatcagggaggacaccctcctggatctcagaagccgcctaacgtaggtatttacccgcctagcactggttggattcctccatccggacctcttacccaaggaggacatccaccaggtagccttttaccacctaataccggtttgccatcaggtagtataccaccattgggatccccaaatcaaattggtcatcctccaggctcgcaaaagccaccaaactcgggaatttatccaccaagtacgggtagtatccctccatcaggtcctcttactcagggtggacatccaccaggaagtctgttgccgcctaatactggccttccttctggcagtattccacctctcggttccccaaatcagattggtcacccgcctggatcacagaagcctccaaattccggtatctatccaccatctaccggttggattcctccttcgggaccattgactcagggcggacatcctcctggaagtctactaccgccaaacacaggtacgtcttc

SEQ ID NO: 2497 - DNA, 615 bp, synthetic construct
  misc_feature 1..615: note = Description of Artificial Sequence: Synthetic polynucleotide
  source 1..615: mol_type = other DNA
gaagacttaaggtgcccagaagtggtgtgacaagacgtgtaaatgcaaatgcgagaaagaaatgccaactggtggatgtgagaataacaaaaaatggtgtgacgaaacttgtgattgcgtttgtcctcagaagaatacatgtattgctcctaaagtttgggacgccaaaacctgctcatgtatctgtgtaaatcctcctaagtgcaactcaccccaggttcttaaagacacatgttgctgtggttgtcaaaacgttaaaagttgcaaagctcctcaaaaattcatcgagaatatatgcgattgtgcctgtcccaataagaagcagtgcaaggcccctttagtttggtctgacgagttctgtgactgcgtctgcccaaactcggcgtccatgaaaacttgtttgtcgccaaaggaatggaacaaagtcacatgcacttgtgactgtaacccgccgaagccggactgttgtcctggtacacaaaagtggatggacgataagtgcaagtgcggttgccctaacgctcaaaccgattgtgctggaggtaagaaattcaacgactttacttgttcttgtggttgcccttctggtaagcttgactgcacaggtacgtcttc

SEQ ID NO: 2498 - DNA, 846 bp, synthetic construct
  misc_feature 1..846: note = Description of Artificial Sequence: Synthetic polynucleotide
  source 1..846: mol_type = other DNA
gaagacttaaggtggaggcatgcaccatcagcatcaacagcatcaacaacaacaacaacatggaaagcatcatttgttattgcatcaccatcacacacacgatcaccaaaattctcataacaatggaaaccaccacgattcggaccatgaccacgttcaccatatgcaccatcatcttcagcaacatggtggtggagatgatgattcctcttctagcatgttggtgggttccttgttacaacaccatcaacatcaacaacaacagcatcaacagcagcaacatcaccatcaacaacaacaccatcatcagcaacagcatagtcctgttgatatctacgccgctgccgcagcagctgcacaccacaatcatcagcagcagcaacaacaccagcaacagcaacaacagcatcatagtcatcatcagcaacttcaattgcaacaacacttgaagtcatctgctgccgctgctgcagcagccgcagctgcagcagaatttgcagcttccaaccatcctttctcaataacgagacttcttccgccaccaccgactgcaagcgccgctgctgcagcctccgcttcagataagccttcgtctgccgcctctgtggctgctgccactgcttctagtgctacagctgcttcagctgctgaaaagatgtatgagatggctgccgcttcgcaatacggcactactgctggatataatgattattatcatcctcacgctcaccctcaccatcctcaccaccatggtcatccacatccacaccatcaacaagcatcactgtatcacgccgcagctgccgccgctgccgccgcggccgctgcagctgcaggtacgtcttc

SEQ ID NO: 2499 - DNA, 630 bp, synthetic construct
  misc_feature 1..630: note = Description of Artificial Sequence: Synthetic polynucleotide
  source 1..630: mol_type = other DNA
gaagacttaaggtactacaggaggaggaggtgttacttatcctggaggtgcacccggaacgactacgggcggtggtacttatcctggtggcgttcacggtacaactactggtggtggtggtacttacccaggaggtgttccaggcacaacaacaggtggaggtggcggtacctaccccggtggagtgcctggtacaactacaggaggcggtggaacttaccctggaggtgtccctggcactaccaccggcggtggtggtacctacccaggtggaggcggaacttatcctggaggagtccctggcactgtaacaaccggtggcggaggtacttatcccggtggcgtgcctggtacggtaacaactggaggaggtggaacttacccaggtggagtcccaggaaccaccggaggtggtggtacctatcctggaggcatgccaggtactacaactggtggaggtgttacctatcctggtggtacaccaggtaccaggattgatggtggcgcagtttatccaccaggtattcctggtactacgactggaggaggaggaacgtacccaggaggaatccctggaaccactaccggcggaggtgtgacttatcctggtggagttccaggtacgtcttc

SEQ ID NO: 2500 - DNA, 537 bp, synthetic construct
  misc_feature 1..537: note = Description of Artificial Sequence: Synthetic polynucleotide
  source 1..537: mol_type = other DNA
gaagacttaaggtggtggtacttaccctggtggtgtcccgggaacaactactggtggaggagttatctatccgggtggtgttccaggtacaacgaccggaggtggcacttatcccggtggagtcccaggaactacgactggtggaggtgttatttacccaggcggcgttcctggcactactaccggaggaggaacttacccaggtggtgtccctggaactacaacaggaggaggagtcatctaccctggaggagttccaggtacaactaccggaggaggtacctaccctggtggagttcctggtacaaccatcaccggtgacgccagagtatacgttggtactattccttcaggtggtgtcgttggaggagaagtctatccaggaaaagttccgggatctggagttgtatatcctggtggagttccagaccgcaccacctccggaggagtcatttatcctggaggtgtgccgggcaccactactggaggtggaacctatcctggaggtgctccaggcactacgacaggtacgtcttc

SEQ ID NO: 2501 - DNA, 561 bp, synthetic construct
  misc_feature 1..561: note = Description of Artificial Sequence: Synthetic polynucleotide
  source 1..561: mol_type = other DNA
gaagacttaaggtcaaaactcagagcagtctaacgaaggtcagaactccgaacagtctaatgaggttcaatcgtcagagcattctaacgaaggacaaaacagcaaacagtccaacgaaggtcagaattctgaacagtctaatgaagtgcagtcgtctgaacactcaaatgaaggacagaattccgagcaatcaaatgaggttcaatcctctgaacacagtaatgaaggtcaaaattctaaacagtccaacgagggacaaaattccaagcaaagcaatgaagtgcagtccagtgaacattggaatgaaggtcagaattccaagcaatctaacgaggatcagaactctgagcagtcaaatgaaggccagaactctaagcagtctaatgagggtcaaaactctaagcaatcgaatgaagatcaaaactccgaacagagtaacgagggccaaaactctaagcagtccaacgaagttcaaagctctgaacagtcaaatgaaggtcaaaacagcaaacaatctaatgagggccagagttctgagcaatctaatgaaggtacgtcttc

SEQ ID NO: 2502 - DNA, 741 bp, synthetic construct
  misc_feature 1..741: note = Description of Artificial Sequence: Synthetic polynucleotide
  source 1..741: mol_type = other DNA
gaagacttaaggttatggaagcactcaaactgctcgtgaaggatcaaatttgacggctggatacggttccactggtacggcaggatctgactcatccctcattgcaggatacggatcaactcagacctctggagaggactcctcattaactgcgggctacggaagtacacagactgcacaagagggctcaaatctgacagcaggatatggtagcaccggcacggcaggttcagattcttctttaatcgcaggctacggttctactcaaacttctggtggagattcttccctaacagctggttacggaagcactcaaacagcgcaagagggaagtaacttaactgcaggttacggaagtactggtaccgcaggatctgatagctcactcattgctggatacggaagtacccaaacaagcggtgaggattcatctttaaccgccggatacggttcgacgcaaaccgctcaggagggttccaacttaacagcaggttatggttcaacaggaaccgcgggatctgactcgtcattaatcgccggttatggatccactcagacgtctggtggtgactcttctctcaccgcaggttacggctcgactcagactgcccaagaaggttctaatttaactagtggatatggttcgacaggtaccgccggtgccgactctagtttgattgctggatatggttccactcaaacgtccggttctgattctgctcttacagcaggtacgtcttc

SEQ ID NO: 2503 - DNA, 633 bp, synthetic construct
  misc_feature 1..633: note = Description of Artificial Sequence: Synthetic polynucleotide
  source 1..633: mol_type = other DNA
gaagacttaaggtagtggacgaatggctgactccggaggaatggccggtagtggcagaatggcagactccggtcgtatggccggttcaggacacatggcaggcagtggacatatggcaggcagtggccacatggcaggatcaggtagaatggctggatccggaagaatggccgactctggtggaatggctggttcttggagaatggccggttctggtagaatggccggatcaggaagaatggcaggaagcggtcgaatggctggttcctggcgtatggccggatccggtcgaatggcaggttccggaagaatggctggatctggtcatatggccggttctggtgatatggcaggttccggatgcatggccggttcgggaaggatggcaggttcaggtcatatggcaggctcaggaaggatggtcggatcgggacatatggttggatctggcagaatggcaggttccggtggcatggctggttcgggtagaatggctggttcatggcgtatggcaggttctggaagaatggctggaagcggacgcatggctggctccggtcacatggccggatcaggagatatggctggaagtggttgtatggctggatcgggaagaatggcaggtacgtcttc

SEQ ID NO: 2504 - DNA, 669 bp, synthetic construct
  misc_feature 1..669: note = Description of Artificial Sequence: Synthetic polynucleotide
  source 1..669: mol_type = other DNA
gaagacttaaggtgtcccaccatctgccggtgttccaccatccgcaggagtaccaccatctgcggacgtacctccttcagctggtgttagtccaagcgctggtatcccaccttcagccggagcacccccaagtgctggtgttctaccgtccgcgggagttccgccgagcgccggagcacctctgtctgctggtgtgctgccaagtgctggtgtgccaccttctgctggtgtccctccatccgcaggagcaccaccttccgccggtgtacctccttccgccggtgtttctccttccgctggaattccacctagcgcaggagccccaccttcggctggagttctaccttcggcaggagttcctttatcagctggtgttccaccaagcgctggtattccaccttcagctggagccccaccatccgctggtgtgcctcctagcgctggagctccaccttccgctggtgttccgccgtcagcaggagtgcctccatcggcatctgtaccaccgtcagcggatgtacctccctctgcaggagtgtccccatccgcaggaataccaccatcagctggaatccctccctctgccggaattccccctagtgctggagctccaccgagtgccggtgcacctccttctgccggcgttccgccatcggcaggtacgtcttc

SEQ ID NO: 2505 - DNA, 906 bp, synthetic construct
  misc_feature 1..906: note = Description of Artificial Sequence: Synthetic polynucleotide
  source 1..906: mol_type = other DNA
gaagacttaaggtgaggtctataactctgccaagaaaacatgctcatgcccagatggtcagtattggaacggtaaacaatgtgtttgtccatatggtcaagttttcaatggaaagcaatgtgttcctgattgtggcaaagaggcaactttcgattacaatcaaaagaaatgcgtctgcaagaataagggtgagatttacgatagtaagacaaaaacttgctcttgtcctgatggacaagtctggaatggcaaacaatgcgtatgtccgtatggacaagttttcaacggtaagcaatgtgtcccggattgtggcaaagacgccacatatgattataatcagaaaaagtgtgtctgcaaaaacaaaggagaagttttcgaccaaaaaactaagacttgctcctgtccagacggtcagtattggaatggtaagcagtgcgcatgtccgtacggacaaatttttaacggaaaacaatgcgttccagactgtggtaaagacgccacctatgattacaaccaaaaaaaatgcgtatgtaagaacaagggtgaggttttcgaccaaaagactaaaacttgtagttgccctgacggacaatattggaacggaaaacaatgtgtttgcccatatggcaaaattttcgacggtaaacagtgtgttgaagattgcggtaaagacgcacactttgacaacaaccaaaagaagtgcgtctgcaataaaaacggtgaaatatacgattcaaaatctaagacctgttcctgcccagattcccaatactgggacggttccaagtgcgcctgcccttatggtactgtctgggatggtaagcattgtaaccaggattgcggaaaggatgctcatttcgattccaaccagaagaagtgtgtttgcaacaaacaaggtacgtcttc

SEQ ID NO: 2506 - DNA, 741 bp, synthetic construct
  misc_feature 1..741: note = Description of Artificial Sequence: Synthetic polynucleotide
  source 1..741: mol_type = other DNA
gaagacttaaggtttatggctatgtaaagcaaatactagattgagacgtcagaacggtcattgtcctccaggattgtggctgtgtaaggcaaatactcgactccgcagacagaacggacattgcccgcctggattatggctgtgtaaagctaatactaggcttagacgtcaaaatggtcattgtccaccaggcttgtggttatgcaaggctaacactcgtttgaggcgtcaaaacggacattgtccaccgggattgtggctttgcaaggctaatacaagacttagacgacaaaatggacattgcccacctggattgtggctgtgcaaggctaacaccaggctaagacgacaaaacggacactgtccaccaggtctttggctttgtaaggccaataccagattgagacgccaaaacggccactgtcctcctggcctctggttgtgcaaggccaatactcgtttaagaaggcaaaatggtcactgccctccaggtctgtggctgtgcaaagctaacactagactgcgtcgtcaaaacggtcattgtccacctggtttatggttatgtaaggccaacacaagattgagaaggcagaatggtcactgtccacctggcttgtggctatgtaaggctaatactagactaagacgtcaaaacggtcactgtcctccaggcctttggttatgtaaggctaacactaggttaaggcgacagaatggtcattgtcctccaggtacgtcttc

SEQ ID NO: 2507 - DNA, 651 bp, synthetic construct
  misc_feature 1..651: note = Description of Artificial Sequence: Synthetic polynucleotide
  source 1..651: mol_type = other DNA
gaagacttaaggtccatggagatcggttggtggtagtttgggcccatggaggtctgttgaaggatccctaggaccatggagatctgttggaggatcgctgtccccatggagatcagctgaaggttcattgggaccttggcgatctgttggtggttcattgggtccgtggcgatcggttggcggaagccttggcccgtggcgatctgttgaaggttcactcggaccatggcgaagcgttggtggaagccttagtccatggagatctgccgagggttccttaggaccatggcgatccgtcggtggttcccttggaccatggagatcagtaggaggaagtttgggtccatggcgttctgtcggaggctcattgggaccatggagatcggcagagggttcgctcggtccatggagatcagttggaggtagtctgggcccatggagatccgtaggaggatccttgggtccttggaggtctgtgggaggtagcctaggtccctggagatctgtagagggatccttaggaccttggcgttcggtcggtggatccttgggaccttggaggagcgttggtggatctctcggaccatggaggtctgctgagggatccctcggaccttggcgtagtgtcggtggttctctaggtacgtcttc

SEQ ID NO: 2508 - DNA, 597 bp, synthetic construct
  misc_feature 1..597: note = Description of Artificial Sequence: Synthetic polynucleotide
  source 1..597: mol_type = other DNA
gaagacttaaggtgaagaaagcgataacggagaagagtccgacaacgaggaggcttccgacaacggagaagcttcagataacggtgaagagtcagataatgaggaggcttcggacaacggtgaagagagtgacaacggtgaagagcgtggcaatggcgaagcttctgataatggagacgaatccgataatggagaggcgtctgacaatggagaagagtcagataacgaagaagcctctgataacggagaggaaagtgataacggtgaggaatctgataacggagaagaaagaggtaatggtgaagctagtgacaacggagatgaatccgataatggtgaagcttccgataatggtgaggaaagtgacaatgaagaggcctctgacaatggtgaagaatctgacaacggtgaagcatcagacaatggtgaggaatcagacaacgaagaggcttctgacaatggcgaagaatctgataatggtgaggcttcggataacggagaggagtctgacaacggcgaggaaagagataatggagaagcatcggataacggtgaagaatctgagaacggtgaagagattggtctaggtacgtcttc

SEQ ID NO: 2509 - DNA, 516 bp, synthetic construct
  misc_feature 1..516: note = Description of Artificial Sequence: Synthetic polynucleotide
  source 1..516: mol_type = other DNA
gaagacttaaggtccattgagtgtggacccacaatctgtaggtcctctgtctgttggttcacaaagtgtaggaccacaaagtgttgatcctcagtccgttggtccgctaagtgtggatcctcaatctgttggtccattatctgtagaccctcagtctgtagatccacagtccgtcggaccactgtcggtcgaccctcaatctgtgggaccactatccgtagacccacagtctgtaggccctctttcagtcggacctcttagtgttgacccacagtcagtaggtccacagtcagttggtcctcaaagcgttggacctttaagtgtagatccgcagtctgttggaccgcaaagtgtcgatccacagtctgtaggtcccttgtctgtagacccgcagagcgtgggtccgttgtcagtgggtccactgagtgtggatcctcagtcagtcggccctcagtctgttggacctcaatccgttggaccattgtcggttgatccacaatctgtaggtacgtcttc

SEQ ID NO: 2510 - DNA, 789 bp, synthetic construct
  misc_feature 1..789: note = Description of Artificial Sequence: Synthetic polynucleotide
  source 1..789: mol_type = other DNA
gaagacttaaggtagccctcaggctcaagagggcgccccaggtaggtcgtcagctcagggttctacgcaggcccgtgaaggtgcaccaggaagatcgtccgcaagaggatcacctcaggctcaagaaggcgctcctggtcgaagctctgctcaaggttcaactcaggccagagagggagcaccaggtaggagttccgctagaggctcacctcaagctcaagagggtgcccctggtcgatcgagtgcccagggtagcactcaagccagagaaggagcaccaggtagaagctctgcacgaggatccccacaagcccaggagggtgcacctggtagatcttcagctcaaggaagcactcaagcaagagaaggcgccccaggtagatcatcggccaggggttccccacaggcacaggagggtgctcctggtcgttcttctgcacaaggatcaacccaggctagggaaggtgcacctggaaggagtagtgctcgtggtagtcctcaagctcaggaaggtgctccgggtagatcctccgcacagggttcgacccaagcacgtgaaggtgcacctggtcgttccagtgctaggggaagtccacaggcgcaagaaggagctcctggcagatctagtgcccaaggttctactcaagctagagagggtgcaccaggtcgttcttctgctaggggttcaccacaagctcaggagggagcaccaggcagatcatcggcccaaggatcaacacaggcacgagagggagctcctggaagatcttctgccagaggtacgtcttc

SEQ ID NO: 2511 - DNA, 627 bp, synthetic construct
  misc_feature 1..627: note = Description of Artificial Sequence: Synthetic polynucleotide
  source 1..627: mol_type = other DNA
gaagacttaaggtggaggtggtccaggaacacaatttccgggtggcgttgtatatcaacctggtacccaagttggcggtggtggtcctggaacgcaaccttccggaggagttttatatccgccaggaacgcaggttggaggtggtggtcctggtacacagttcccagatggtgtagtttaccaacccggaacccaagttggaggcggcggtcctggtgcccaactgccaggagccgtcctctatcctccaggaacccaagttataggaggcggaggacccggaacacaaacaccaggtggtgttgtctaccaaccaggaatccaagctggcggtggaggccctggtgcacaagcccctggaattgtctaccagcctggtacgcaagtcggcggcggacctggcgctcctggcggtattgtttatcaaccaggaaccaaaactgtgggaggcggtcctggtgctcaagctccaggtgtcgtctatcaacctggaacacaggttggtggtggccctggtgcacctggtggaattgtttaccaaccaggaactcagactggtggaggtggaccaggcgctcaagccccaggtttgatttatcaacctggaactcaggcaggtacgtcttc

SEQ ID NO: 2512 - DNA, 876 bp, synthetic construct
  misc_feature 1..876: note = Description of Artificial Sequence: Synthetic polynucleotide
  source 1..876: mol_type = other DNA
gaagacttaaggtatgaacaggttcatgaacagatataggcctatgtttaacaatatgtattcgaacatgtacagaggtcgttatagaggaatgatggaacctatgtcgagaatgacaatggatttccaaggtcgctatatggattcacaaggacgtatggtggatccaagatattatgactattatggacgtttcaatgactatgacagatattatggaaggtcaatgtttaactacggatggatgatggacggagacagatacaatcgttacaacagatggatggattacccggaacgttacatggatatgtctggataccaaatggacatgtcgggtagatggatggatatgcaaggccgacattgcaacccttactctcagtggatgatgtataactacaaccgtcacggttattatccaaattattcctatggtagacacatgttctaccctgagaggtggatggatatgtcaaattacagcatggacatgtacggaagatatatggacaggtggggaagatattgtaaccctttcagtcagtacatgaactattacggtagatactggaattaccctggatacaacaactactactactcccgaaatatgtattacccagaaagatacttcgatatgtctaactggcaaatggacatgcaaggaaggtggatggacaaccaaggtagatactgtagtccatactggaataattggtatggtagacatatgtactatccttaccagaataactacttctatggccgatatgactaccctggaatggactacagtaactaccagatggatatgcagggccgatacatggaccaatacggaatgaacgattattattactcaggtacgtcttc

SEQ ID NO: 2513 - protein, 460 aa, Ceratitis capitata
GLQPSAGYQPGAGYQPGTGLQPGAGYQPGAGLQPGAGVQPGAGVQPGAGLPPSAGLQPGAGLQPGAGLQPGTGYQPGAGYQPGAGLQPGAGLQPGAGLQPGAGLQPGAGYHPGAGLQPGIGPQPGAGLQSGAGLQPGSGLQPGAGYQPGPGLQPGAGYQPSAGIRPDMGLQPGAGYKPGSGYQPGSSYQPGAGLHPGIQQGTGLHPGTGLQPRVGLQPGAGVQPGAEYQPGSGYQPDASLHPGAGLQPGGRLQPSAGLQPGTGLQPGVGVQPGAEYQPGSGYQPGAGLQPGAGLLPGGRLQPGAGLQPGTGLQPGAGYQPGSIYQPGAGYQPGAGLQPGAGVQPGTGYRPGAGLQPGGRLQPSAGLQPGAGLQPGAGVQPGAEYQPGSGYQPGAGLQPGTGIQPGAGLQPGVGLQPGAGLQPGAVLQPGTGYQPGAGYQPGTGLQAGAGLQPGAGLQPGS

SEQ ID NO: 2514 - protein, 362 aa, Archimantis monstrosa
GSPLEEKYDEKSEADDYQSEDSSAAIHDQTTKIATNAVKTYANKAKATESKAKLYHQYSKDRAYYSREYEKMGEEYMKKSKEYEQLYIAEAARISLHENKQKEWDTKGREANVGIREYETKSQQASSKKNELLEESIIAAVQAAIHETQATGYLLKSEAANGIARNMLQIAESIRDEASNHYQIGKEELNRATAQKVKAQQQAEDSQRHHAAARAYQQDSLRSRMASRANNMQYMQNSLLAERAHSLSTENTLESELYGKEADELAKMSEESAAISKICSGEERSYRNMAKQSEVKAYEYSVSKNMMGADMTDTAAMANGDEAKQGDDEEQQMYRSPNIPAEDSTKNLSYNLKDSTEGEGMS

SEQ ID NO: 2515 - protein, 351 aa, Archimantis monstrosa
GKKHEALTFGSGYKSTYGEGETFDDEDDQALRNERVPVGALSAAIINPYALHSEEGRIAYDTSSQYYANKAEGSADLSREKKQMHGEYHGKAATYASRANEAYKKSQLHKRQAKDKQAIAKEYEERAQKHESRSKALDVRDQDDERKSVTEMEEYARALKIANLALVFAGIYQETGRLQLEATNVFEQFHKMLSTKGEEYKKQAEEYKEKANKEKEEAAIQQAKSKELNAKAQEYENIFIESSKKLAANRYYELEFKMKAENERHHAELARIRSRFLSRLANYNREQAEAVLRFARSERKDGEIFRRNAIELYKETRALAATAARVMKQHRYTGQEIYTKQPFPHSNYHGA

SEQ ID NO: 2516 - protein, 364 aa, Pseudomantis albofimbriata
GSPLEEKYGEKYGDMEEYQRGTEDSRAVINDHTAKVASQSARGMVNKAKTTEAAARSNEQLSKDRQYYYREYLKKADYHKKKALEYEQLSAAENAKIAYHESKQKDWETKARESDVQCRDAEAKYEQSYTRSRELKRESIIAYVQAAMHHAEASGDHMKADRAKDIARDMMRKAESLRGDASNHYQRSEEDKNKARSEKVKAHQNADNSQRHHTACRAYDQEGLKTRLSSKANMMRQIHSSLLAERSHSLAREDGLAADLSHKLAEELARMSEESGAISKINSGEERGYSNKVRQDEVKAHELAVSKRMMGAEVADNSEMISLAQAKDGSLDEGENYKLSTFYADDSTKNMLPDSRGQMSYGDE

SEQ ID NO: 2517 - protein, 348 aa, Pseudomantis albofimbriata
GKNHEVMTYGSGYKTMGDEGGSGVGNEGEDYQDNEGATAATILDESTHHTEEARDIFGTRSEAHAYSAEMFADLVREKRQASIESHKKAEDYAVRANEESKKSQLLKRQARDKQAIAKQYEEKAQKYDRISKQQDIKEQDDYRKSDAESEEYKRSIAVANAALALASAYEEASRMELDATGEMEQQSKELYTKSEEYNKVAEECITRAKKEKELARIEEAKGKEAEAKSQEYENFATDNNKKYNAMKFYGWEFKMKAENERHNADYCRIKSRYLAQLSNYNREQAEALYHFAAAQRKDAELFHRYAMELYKQTRVLTASAAQIMKQHRYTGQEIYSKQPFPHSNYHGA

SEQ ID NO: 2518 - protein, 366 aa, Tenodera australasiae
GSPLEDKYDQKYEVEDYRGGSEDTKAAINDNAARVASHSAKSHVNKALVVEAAARLNAQIAKDRNYYAREYTKLAEESKKRARQYGQLADMEAGRIGQHEHMQQEWNSKARESEAQCKATEAKAQEEYTKARDERQKSLVSNAEAAMHDAQATVDTMKSERAYEIGKELMRKAENARNDASNHYQRAKENRERANSETVKSHQQAQDAQRHNAASKAYQQDGLRTRMASRINIMKYIQSSLLAERAANQARIEQLKSEWYEKAANEYSRMSEENAAISKLAGSEEHYFAQRAKRNEGKAYELSQSKRMMGSEAAAAGELLAMSQAKDDETEDEKHFDFPIYESDDPTKLSPSPDEKDLTYGSGEGL

SEQ ID NO: 2519 - protein, 342 aa, Tenodera australasiae
GKKHEVMTYGSGYKHMGGETYEDVGTGNRLGSTAFDIMEAADENTERASHTFGSKSAAYSSDADLFIELLREKRETRANHGKRAESQAVLANESYQKSQLHKRQAKDKQAISKEYEERAQKHDRLSKEQDMKEHDDYRKSNAEDTELRNSVERSNYDHVMALGYHELSQLEMGETNQCEQLSRELQSRAEEYFNLAKELKEKAKKEKENARIKKAKAKEEEARAEEYENAFTENSKKVLAYKFYELEFGMKALNEHHQAESARVRHHFLQILEQHNSQHADMLWGYAQQEDKDGRSFTQYATELSKQTKMLTATAAHLMKQHRYTGMEMYSKQPFPHSNYHG

SEQ ID NO: 2520 - protein, 250 aa, Hydropsyche angustipennis
GPRGWYGPRGLGPRGLGPLGLDSDIIGDGYGPYGLGSRGLGPLGLDSDIIGDGYGPRGLGPHGLGPRGLGPLGLDSDIIGDGYGPYGLGPRGLGPLGGLGRRPYGGYSASGSVSAEGPRGWYGPRGLGGIGGWRSRPYGGYSASHSVSVEAPVVYHAPIIRRAPKISRSSSYSVERIVTPTVITRISGSHSVSAEGRRGVWGPHGVWGPSGLYGDSGIVDGVYGPGLVGPGGWGRRPYGGYSASRSVSAE

SEQ ID NO: 2521 - protein, 280 aa, Hydropsyche angustipennis
GPRGWYGPRGLGPRGLGPLGLDSDIIGDGYGPYGLGSRGLGPLGLDSDIIGDGYGPRGLGPRGLGPLGLDSDIIGDGYGPYGLGPRGLGPLGGLGRRPYGGYSASGSVSAEGPRGWYGPRGLGGIGGWRSRPYGGYSASHSVSVEAPVVYHAPIIRRAPKISRSASYSVERIVRPTVITKIHKSVSHSVEQPIYYRPPVVVRAPKVSKSESYSVERIVTPTVITRIHHSASDSVEQPIYYRPPVVVRRPKISRSASYSVERIVTPTVITRISGSHSVSAE

SEQ ID NO: 2522 - protein, 128 aa, Hydropsyche angustipennis
GKIGHNAQKGIDDFLGGAHISKCGKHERILQGEDIIETNAKGELIEKIVSRKEILTDDDSESFSVSYSSEDDSTETIVKTITIVQEIPKHGKGKGHAKEKIFEEETVIKKIGKGVAAPVVAPAVDIVG

SEQ ID NO: 2523 - protein, 200 aa, Hydropsyche angustipennis
GRRGVYGPRGVWGPSGLYGDSGILDGVYGPGLVGPGGWGRRPYGGYSASSSVSAEGPRGWYGPRGLGPRRIGLGGYSASGSVSAEGPRGWYGPRGLGPRRIGSLGGYSASGSVSAEGIRGVLRPSPGIVVPGVISSGVVAPGLVGGHGGLVNVGGTHVLPGTSVYTTHPDPRTVRSSCRTSPYNLLIKVGNARKLNGNCS

SEQ ID NO: 2524 - protein, 257 aa, Hydropsyche sp.
GNRYYDLWNTCCQRPRYDGCGIFGNHLWDYVKYSASWSHSVENYDVGYHGFYWDDSWVHGVPHGNYYYPLWNYCCQHPRCNRCGIFGHHLQDYVKYSASWSTSVENYGYDVSYPGFYWDNSWVHGVPHGNHYYPLWNYCCQHPRCNRCGIFGHHLQDYIKYSASWSTSVENYGYDVGYPGFYWDDSWVHGVPHGNHYYPLWNYCCHHPRCNRCGIFGHHLQDYVKYSASWSTSVEDYGGYDYDFYWDDSWVHGVPHL

SEQ ID NO: 2525 - protein, 272 aa, Rhyacophila obliterata
GRGLGRGKHGWGGLGHGGLGGLGHGGLGGLGHGGLGGLGHGGLGGLGSDSGDLGGIGGLLGPGGRRGWGRRGPGKYSASVSISHSISIERVITPGVYTSIHRSVSVSHSVSVEHRRRIAPIVVDYSISSSLSISGEGRGLGRGKHGWGGLGHGGLGGLGHGGLGGLGHGGLGGLGHGGLGGLGSDSGDLGGIGGLLGPGGRRGWGRRGPGKYSASVSISHSISIERVITPGVYTSIHRSVSVSHSVSVEHRRRIAPIVVDYSISSSLSISGE

SEQ ID NO: 2526 - protein, 272 aa, Rhyacophila obliterata; identical to SEQ ID NO: 2525

SEQ ID NO: 2527 - protein, 218 aa, Rhyacophila obliterata
GRGLGRGKHGWGGLGHGGLGGLGHGGLGGLGHGGLGGLGHGGLGGLGSDSGDLGGIGGLLGPGGRRGWGRRGPGKYSASVSISHSISIERVITPGVYTSIHRSVSVSHSVSIERPRRIISPVVDYSLSISASSSVSAEGGRRRRLPGSCGTIISDSSSNVGGLGRIGALHKLGGGRIPRPAIYTRHPGLKGLKPQCPLSNFNVHVKVGNIRKANGNCG

SEQ ID NO: 2528 - protein, 256 aa, Rhyacophila obliterata
GSSVIDKLEDLLTHGHHGHHWEGTDGLHEKLLQEDDVIEANSKGEIIEKIISRREIITDDNSESESDSDSSEDSGSTEKIIKQIIIVQEKPKHGHHHAKEKIYEEEIIIKKIGDLPKKDCDENKPREVTSWRHTLPNRKSISISKSISIEQIIKPHVITRIRTSKSSSLSISVERPRRIISPIISGGWNRHKPRKYSASSSISKSISIERVITPAVWTRIHKSVSVSHSVSVEHRRRIAPIVVDYSISSSLSISGE

SEQ ID NO: 2529 - protein, 424 aa, Limnephilus decipiens
GRRRGPWGYGRGLSGSGDLDGLGGVGGLGGLGGLGGRRGPWGRGYGSSGTVSVSVSVEEGRRRGPWGRRGKVSISRSVSIERIVTPGVYTQISRSSSVSVEGGRRRGPWGRGYGPTGSVSVSVSVEGGRRRGPWGYGRRLGGLSGSGDLDGLGGVGGLGGLGGLGGRRGPWVRGYGSSVSVSVSVEGGRRRGPWGRRGKVSISRSGSIERIVTPGVYTKISRSSSVSVEGGRRRGPWGRGYGSSGSVSVSVEGGRRRGPWGRRGKVSISRSVSIERIVTPGIYTKISRSSSVSVEGGRRRGPWGYGRGLGGLSGSGDLDGLGGVGGLGGLGGLGGRRGPWGRGYGSSGSVSVSLSVEGVRRRGPWGRRGKVSISRSVSIERIVTPGSYSKISRSSSVSVEGGIRRGPWGRFGGFVSSGSSSVES

SEQ ID NO: 2530 - protein, 734 aa, Chironomus pallidivittatus
GPIANFVGFVISLLFSLFEVMVSVVFDVKSFTSLSTPTCNSTVPSFATRVGGGRFSGIITASFNMIAMISANVQAIQSGSGSTSGSSSSSTTSTSNSTTTTSNSTTTTTNSTTTTSNSTSSSNSTSSGLTSSASVVSLIDTIAWVYQDSSVGIAYLMVSILALFYGQSVSAPPYPDLGIPALPANCSGPGVPQSVQIRAAIAYVNITIYFINMTGQQFEDLQGPVATDCGCPNTTSVAPLVLEWEAILAALQALANSTASANSTTSSNSTTTTTTNSTSTTTTNSTTTTNSTSSSNSSTIAGCIDISANLTIALQNLQALLLQESTCAPALAANAKKSGVRDMSPCKPGKTASGCAKSGEKKVKRKARLEKMRAKCRRAVGNRMKGSMKKRVRSRAKKFGKAAKSGVRRYRKNIKYVYIPPVMASLNAYAALMASLSESISSQSDSALNSTDQACNSTGSNTDAAVIAATNNVTDMFANFTAMVLNNTVAYPNCTQFADMALLMISQINDQIISCGSQSDDAESSIYFNVTMNIVAMAQEYNNFASMSDKCTRSFANSWLWMYIKWVFYRMGMTSGIPNFLACQTKAESSLTAFLASFNATINATIAAASANSSSVQSSEASCIESSLSDASAILAMYENAYQNCVAPGSVPDAANTTTTSTTTTTTTTTTAAPTTTTTKAANAPFTYPLCNLQMTAACVAALPTCTYPFISSAGCCPSGKTLNTGLGGRGCCK

SEQ ID NO: 2531 - protein, 298 aa, Chironomus pallidivittatus
GCECGCAELNCPQNKKPNKETCECECKILAKCNDGQVFNKDTCSCNCPGSASDKVCKKPQIYNNESCKCGCPVDMQKPIDGCPRPQRWESDSCSCECPLKQDCKNGKVWDATICQCICPRDALPCAAGKERCGESCQCKCINREPKEGCSKSLVWNEDKCECVCPAGKQMPVGGCESGKSFNALTCQCECDESASKCGNKRWNADTCKCECQPGKPPEGCGKQTWISEKCKCECSPAITCEAPQILDPNTCECKCPVNMLAEKEKCKLPRQWTDSKCLCQCPTAPVTCEGKETWCGET

SEQ ID NO: 2532 - protein, 297 aa, Chironomus pallidivittatus
GCQCECKNKQEMANCKSPRTWNYDTCKCDCKNADDSDDCVKPQIWLDNQCKCGCPASAQMTCADNKRFIEKSCKCECKLAMPATIPPGKKWNEDKCVLECANVKTCEGPQRWCDNQCKCICPQVNTKCSDKQKFIESKCECGCDTQTQCKNGFRWSNLECGCLCDEKKCQGKQVFDKNTCQCKCPNQKPGDTCGNGKDFCPLDCSCKCKSPKPANGCPGVQEWNEEKCQCECPKDKPKKQCPGGQDWNNHLCQCGCPTPAPTCSNKQKYSNVSCSCGCKPGKPKEGRPGKQIWCENT

SEQ ID NO: 2533 - protein, 299 aa, Chironomus thummi
GCQCECPKPMPTEGCGPQSWNGESCKCECPSSITCSSPQIIDKDTCECKCPKNMLADKEKCTAPRQWIDSSCSCKCPTTPAVCEGNQKWCDESCQCTCPGGKKECGDNKYFDESSCECKCKSNPTCSDPQIWDADDCSCKCPKDKKMPKGGCLNGQEWNKLACSCGCPEPRPVCTDEQTYNNNTCKCGCGIDKPSCPKQQTYNWNKCQCGCPEEMKKPAGGCGAKTWLEEDCQCNCVPGKPAGGCLGAQKWCDDECICKCSNSEPAKGCGNKQWSDVSCDCECPTKKTCADPQVWDANT

SEQ ID NO: 2534 - protein, 286 aa, synthetic construct
  REGION 1..286: note = Description of Artificial Sequence: Synthetic polypeptide
GPYGDGLGPRGYSASASQSGEGGWGYGPYGGSLGPYGGSLGPRGYSASASRSVEGGWGYGPYGGGVGPYGGSLGPYGDGLGPYGSGVGPYGDGLGPYGGGVGPYGDGLGPYGGSLGPYGDGLGPYGGGVGPYGDGLGPYGGSLGPYGDGLGPRGYSASASQSGEGGWGYGPYGGSLGPYGGSLGPRGYSASASRSVEGGWGYGPYGGGVGPYGGSLGPYGDGLGPYGSGVGPYGDGLGPYGGGVGPYGDGLGPYGGSLGPYGDGLGPYGGGVGPYGDGLGPYGGSL

SEQ ID NO: 2535 - protein, 320 aa, Mallada signata
GSAGASSNGSVAGASKGAAGASSNGSSASASKGSAGASSGSSTATASKGSAGASSNGSSASATKGSAGASSGNSTAVASKGSAGASSNGSSASASKGSAGASSQGSSASATKGSAGATSNGSSAVASKGSAGASSGNSTASATKGSSSASSNGSSAGASKDGAGAASNGSTAVASKGSAGAASGNSTASATKGSSSASSNGSSATASKGSAGATSNGSSAVASKGSAGASSGNSTASASKGSAGASSNGSSATATKGSAGATSNGSSAVASKGSAGASSGNSTASASKGSAGASSNGSSATATKGSAGATSNGSSAVASK

SEQ ID NO: 2536 - protein, 159 aa, Mallada signata
GHPTDCGNSGGSSGSSAASGAASSSGSGSAAGSGAASGSGAASGSGAASGSGAASGSGAASGSGAASGSGAASGSGAASGSGAASGSGAASGSGAASGSGAASGSGAASGSGAASGSGSASGSGSASGSGSSSGSGSSGCGSGGSASGSSGGSSASASK

SEQ ID NO: 2537 - protein, 186 aa, Mallada signata
GSAGASSGNSTASASKGSAGASSNGSSATASKGSAGATSNGSSAVASKGSAGASSGNSTASASKGSAGASSDGSSASASKGSAGATSNGSSAVASKGSAGASSGNSTASASKGSAGASSGGSTAAASKGSASASSDGFSAACDSGESEAVDKANLAAIANIAAAAGKPAACGSAPPSDDYYDYGCG

SEQ ID NO: 2538 - protein, 256 aa, Mallada signata
GSSASASKNSAGASSNGSSAGASSGSAGASSGGSSASATKGSAGASSGGSSAGASSGSAGASSGGSSASATKGSAGASSGSSSAGASNGSAGASSGGSTASATKGSAGASSGGSTAGASNGSAGASSGGSSASATKESAGASSNGSSAGASNGSAGASSGGSSASATKNSAGASSGNSSAGASNGSASSSSGSSSSTATKESAGASSNGSTASASKDSAGASSGGSSAGATCSGAGAASGGSVSSATKNSSAASSQ

SEQ ID NO: 2539 - protein, 288 aa, Mallada signata
GSSGGATSSAGAGSASGSSGGSTSGASAGSASGSSGGSSSSAGSGSASGSSGDSSSSAGSGTASGSSGGATSSAGAGSASGSSGGSTSGASAGSASGSSGGSSSSAGSGSASGSSGDSSSSAGSGTASGSSGGATSSAGAGSASGSSGGSTSGASAGSASGSSGGSSSSAGSGSASGSSGDSSSSAGSGSASGSSGGSTSGASAGSASGSSGGSSSSAGSGSASGSSGDSSSSAGSGSASGSSCGSTSGASNGSASGSSGGSSSSAGSGSASGSSGDSSSSAGSGSAS

SEQ ID NO: 2540 - protein, 133 aa, Mallada signata
GQDSGCNVIAYPTASCGDSGSGSAASSGAASSSGSGSASGSGAASGSGSASGSGAASGSGSAAGSGAASGSGAASGSGSASGSGSASGSGSAAGSGAASGSGSASGSGSSSSGSSSSGSSGGCGGGSGSASSG

SEQ ID NO: 2541 - protein, 162 aa, Mallada signata
GSSGGSSSAAGSGSASGASGGATSAAGSGSASGSSGGSSSGASSGSASGSSGGCGSGGSSGSGSGSASGSGSASGSGSASGSGSASGSGAASGSGAASGSGAASGSGAASGSGAASGSGAASGSGAASGSAAASGAASSSGSASGSGSGSGSSDDSEDDSCG

SEQ ID NO: 2542 - protein, 210 aa, Mallada signata
GANGAAAASAAAAAARRAGAIGLNGAAGANVAVAGGKKGGAAGLNAGAGASLVSAAARRNGALGLNGAAGANLAAAGGKKGGAIGLNAGASANVGAAAAKKNGAIGLNSAASANAAAAAAKKGGAIGLNAGASANAAAAAAKKSGAVGLNAGASANAAAAAAKKSGAVAANSAASANAAAAAQKKAAADAANAAASESAAAAAAKKAAAV

SEQ ID NO: 2543 - protein, 200 aa, Haploembia solieri
GSASGSASGSKSESGSASGSASGSKSESGSASGSESGSAQGGGSKSESGSSSGSASGSKSESGSASGSASGSKSESGSASGSGSGSKSESGSASGSASGSKSESGSASGSASGSKSESGSASGSESGSAQGGGSKSESGSSSGSASGSKSESGSASGSASGSKSESGSASGSGSGSKSESGSASGSESGSAAGGGSKSES

SEQ ID NO: 2544 - protein, 266 aa, synthetic construct
  REGION 1..266: note = Description of Artificial Sequence: Synthetic polypeptide
GAVYLRLSSDGSCPADQVCCREEDSNEICGGTCVPEGACEAGGINLRVGGAGGGCSFGEICCDLPLNRCRGTCTTVDLCGDNRRVDLRFEDQLCPGSQVCCEKSKTNAICHGRCVAANECSRSSNLVDLRVQSNDGCPGDRICCQNTCEGQCVPRGQCGDDTKDIDLRVGDSSCPENQVCCKNPRTCTCVDPSKCPQMINLRFSSECPFHQVCCDSVSDSNCQGLCTPDDQCKVRSNGTCSGGLTCCGKIKPSCDGSCVSLGQCPT

SEQ ID NO: 2545 - protein, 258 aa, synthetic construct
  REGION 1..258: note = Description of Artificial Sequence: Synthetic polypeptide
GCPANQQDPFAVCCRNASKLCNGSCVSQEQCADSGFDLRISSQTCPGNAVCCKNLSKSPTGKVCQGRCVPSQQCTGQSQNSVDLRFSEGLCPLNLVCCPASTSCSGSCVAGNRCLDNALSINLRRSTESCPAGLVCCQNVNKGSTCDGQCTSRDRCADLTLGINLRLSDQSCPSNQICCKKVRKPLPDAECTCVMLDQCADDQRSIDLRTGGQKCPSRKICCTKLKTTVEKCDGSCISYQDCPEIANASSVDLRLFSG

SEQ ID NO: 2546 - protein, 377 aa, Oecophylla smaragdina
GVPKELGTSISSASASASASASATASSSSKNVHLLPLKSEHGIVIDKSKFNIRKVVLSAIDEINGAPNIGLGLKQVSLALAKAQASAQSSAEALAIIKKIVALLISAYVRAAEAAARASAEALATVRAAEQAQKIAEAKGRAAAEALSELVEASQKADAAAAGTTDAIERTYQDARAATSAQTKASGEAENANRNAAATLAAVLSIAKAASGQGGTRAAVDAAAAAAAAAALHAKANAVSQATSKAAAEARVAAEEAASAQASASASAQLTAQLEEKVSADQQAASASTDTSAAIAEAEAAALASTVNAINDGVVIGLGNTASSSAQASAQASALARAKNARPKIKGWYKIGGATSASASASASASAQSSSQGLVYS

SEQ ID NO: 2547 - protein, 373 aa, Oecophylla smaragdina
GSKSYLLGSSASASASASASASAGGSTGGVGVGSVISGGNNIIRGASTTSVTLAAAAAEAKAALNAGKATVEEQREALQLLTASAEKNAEARSLADDAAVLVQGAAEAQSVAAAKTVAVEQGSNSLDAAAAEAEAAAAASRVSAQQALQAAQTSAAAIQTAAGSALTALKLARKQEAESNNAAEQANKALALSRAASAATQRAVAAQNAAAASAASAGAAQAEARNAYAKAKAAIAALTAAQRNYAAAKASASAGSVVAEQDAQSRAADAEVNAVAQAAARASVRNQEIVEIGAEFGNASGGVISTGTRSSGGKGVSVTAGAQASASASATSSSSSSSGINKGHPRWGHNWGLGSSEASANAEAESSASSYSS

SEQ ID NO: 2548 - protein, 425 aa, Oecophylla smaragdina
GSELVGSDASATASAEASASSSAYGSKYGIGSGAVSGASASASASASASASASSAPAIEGVNVGTGVSNTASASAEALSRGLGIGQAAAEAQAAAAGQAAIAAKSCALAAKSTAQAVALVEKVARAEVDLAESARKATRLSAEAAKAAAEVEKDLVGLRGAAGKLNLAARAGSKAQERANEDSIEANELAQATAAAGAEAEAKANAAQEAGASALAIAQAALNIEQETVKLTRQAQNTRLRSENILAAASNARAIASAEAEASSDLNNRANAARSNARAAAETRAVATEAASTAEIAAYSSSEKGEITNPGPLPKIVSVTAGLTQNEIAGSGAAASASASALASASAGAGAGAGAGAGASAGAGAVAGAGAGAGAGASAGASAGANAGAGASSLLLPQSKLHPISRSSASASASAEAEANSSAYA

SEQ ID NO: 2549 - protein, 381 aa, Oecophylla smaragdina
GVIGPDTSSSSQASASASASASASASSSASIGYNELHKSINAPALAVGVKNGGVDVAKGAAVVESAISDVSTLTDDRTLNGLAIIGNSAESLARAQASSSASAGAKANALIKQSIAAIEITEKAEYLASIVATKAAKAAEATAAATARATAVAEAAKVSSEQFAAEARAAADAEAKANAASIIANKANAVLAEAATGLSASAGKAQQSATRALQAARAAAKAQAELTQKAAQILVLIAEAKAAVSRASADQSVCTSQAQAASQIQSRASAAESAASAQSEANTIAAEAVARADAEAASQAQAWAESFKRELSSVVLEAEANASASASAGALASGSSSSGASSSADASAGASSYGSLGGYRHGGSFSEASAAASAASRAEAA

SEQ ID NO: 2550 - protein, 377 aa, Myrmecia forficata
GNLLKESKASASASASASARASGKKNLHVLPLPKKSEHGIVIDKSVFDIKDVVLSAVDEINGAPKLGLGWKKVSMGVERAEANAAAAAEALAMIKKIAMARSSAYVQAAWASAQASADALASARVAQASQEAAEAKGRAASEALSRAIEASSRADAAAAATLDAMDRTMENARAANAAQTQASGQAENANRSAAAILAALLRIAEASALNNEAAVNAAAAAAAASALQAKANAASQATARAAGQASTAAEEAQSAQEAADKNAELTTVMLEKASADQQAASARADYYTASTEAEAAAQASAINALRDGIVVGMGNDAGASAQAMAQVEALARASEHKALGEKKKGLVWGYGSKGSSSASASASASAEASSRLGKDWG

SEQ ID NO: 2551 - protein, 404 aa, Myrmecia forficata
GSGPRLLGGRSAASASASASAEASAGGWRKSGASASASAKAGSSNILSRVGASRAAATLVASAAVEAKAGLRAGKATAEEQREALEMLTLSADKNAEARILADDTAVLVQGSAEAQSVAAAKTVAVEEESASLDAAAVEAEVAAATSKSSAGQALQSAQTAASALRTSARSALTALKLARLQGAASSNAARMMEKALAATQDANAAAQQAMAAESAAAEAAAIAAAKQSEARDAGAEAKAAMAALITAQRNLVQANARAEMASEEAELDSKSRASDAKVNAVARAASKSSIRRDELIEIGAEFGKASGEVISTGTRSNGGQDAIATAEASSSASAVGIKKTSGHWGSGKWSRVSKGKGWASSNADADASSSSIIIGGLKRGGLGSEASAAASAEAEASAGTLLL

SEQ ID NO: 2552 - protein, 424 aa, Myrmecia forficata
GSELESEASAAASAQAEASSSGRSGKLSASQASASASASASAGSRGGSKGGWGQLRRGDVKSEAKSAAAIAVEGAKIGTGIGNTASASAEALSRGLGIGQAAAEAQAAAAGQAEVAAKSCELADKTTAKAVAMVEAAAEAEIEVANQEVAAVKLSTWAAKAARIVEEDSAAVRAAAGKLLLAARAAAAAERRANEESEAANELAQASSAAAAEAEAKANAGREAAAAALAIAEAAVAIEQEAVILARKAQDARLNAEAAAAAAMNARVIASAESEASEDLENRASVARASAAGAAEAKAIATDAGATAEIAAYSWAKKGELINPGPLPKIISVNADLSKSEVEAMKITRGQVQEVKKISTHKGGWGWGKEGRSKVSSNASARASASANAAAGSLGSKWGRQLSASSASADANAEADSQLLKVWG

SEQ ID NO: 2553 - protein, 393 aa, Myrmecia forficata
GRVIESSSSASAQASASAGSRGLLGKRPIGKLEWGKEEKKLEELDEESLNEAALKVGIKNGGLDVAKGAAVLEAAMSDVATLTDQRSLVDLGLGPVANEAEILAEAQAATSAQAGAVANSAAERAIAAMEMADRTEYIAALVTTKAAKAAEATMAATARATAAASASKISSQESAASAANAANAEAKANAASIIANKANAVLAEAAAVLAATAAKAKESAMKSLSAAQAAAKAQARNAEASAEAQIKLSQARAAVARAAADQAVCSSQAQAASQIQSRASASESAASAQSETNTAAAEAVATADAEAAAQAEAWVMSLKNDLWLHLNMKGEAKAEGEAVSISKGHRGGIRSGSISEASAEASSNVSMGGRHGRKDLVSEALAGASAGSSADSL

SEQ ID NO: 2554 - protein, 313 aa, Bombus terrestris
GSVELGAPKQESVLVEQLLLKNVETSAKRKENGAPKLGESTAAALASTKATAAAEAKASAKVKASALALAEAFLRASAAFAAASAKAAAAVKEATQAQLLAQEKALIALKTQSEQQAASARADAAAAAAVSALERAQASSRAATTAQDISSDLEKRVATSAAAEAGATLRAEQSAAQSKWSAALAAQTAAAAAAIEAKATASSESTAAATSKAAVLTADTSSAEAAAAAEAQSASRIAGTAATEGSANWASENSRTAQLEASASAKATAAAAVGDGAIIGLARDASAAAQAAAEVKALAEASASLGASEKDKK

SEQ ID NO: 2555 - protein, 308 aa, Bombus terrestris
GQSSPLLEIVQGSASATASTAVTARSGLRAGQVAVASQKDATLQADASAAAAAAARASADQSASLAQQSASLQSKAAARAKSAEESAAATAKAELQAESIAASASSNAREAAASAKASASAMSSAAVQAKLAEKTAKNQALASEEAKLKAAAAASAAAAASAAAEAALKAERIAEEAIAKAAAAKAAARAAAAALNSAKEAATSSARSAAEAEAKSEVAILISELDKKSREVAASASAKARAAAAASSRNAETAVIGANINVAKEVLAIPIEPKKLPEPELALKEENVAVASSESEVKVETSSEAWSI

SEQ ID NO: 2556 - protein, 338 aa, Bombus terrestris
GKPLIANAQIGKVKTETSSSSEIETLVSGSQTLVAGSETLASESEALASKSEALTSEAEIASVTTKDELILKGEAITGKKLGTGASEVAAASGEAIATTLGAGQAAAEAQAAAAAQAKSAAAAAANAGESSNSAAALVAAAAAAQGKAAAAAAAATKASLEAADAAEEAESAVALARAASAKAEALASTAAAANTRAALQAEKSNELAQAEAAAAAEAQAKAAAAAKATQLALKVAETAVKTEADAAAAAVAAAKARAVADAAASRATAVNAIAEAEERDSAQAENTAGVAQAALAAAEAQDSCIGAAATPRHSSSYAWWKLRITSLIVILSPRNRRT

SEQ ID NO: 2557 - protein, 295 aa, Bombus terrestris
GHVVKRDKELKAPALPELLGDGSDTLGASMENGIKVARASQNVGLRTELNAAARAAAAAATKQAKDTEAAEAGAAAAIAIAIAKREEAIKASELASKLLTAAAGSSEAAVSATVRAAQLTAAASAAAKASASASEASAEAQVRANAEANIAKKASAAEAKAAAEAQVKAELAKKAAAGFLAKARLAASAESEATKLAAEAEVALAKARVAVDQSQSAQATATAQAATAVQLQSQAANAEASAVAQAETLLVTAEAVSAAEAEAATKATSWGEECHQREKVTFSEDRLNERQDNWG

SEQ ID NO: 2558 - protein, 488 aa, Bombus terrestris
GDRSWAASDANAEASAAVESPSLWEDSSSASAGASNAAESSSLWEDSSSENTGASTAAESSSLWEDSSSASARASTAAGSSSAWEDSSITNARESGASGSLSSWEDSSSASASSSTSASASSSSSSSSSISSSASSSSSASASASTEASNESRRGIAIEGALVGTGAASTAAASAEMLSDTLGLGQSALQAQTASVTQANIASDASNQANRLAAAAAAAMSAAASAQENAASLARASASASESAASASSKAEASAEAAKSSAEKCLLLAQNSAQAQARATEQSESSNRDSAANAAAAAEAERKATLALKAIADAKAKAGVAVAAQSEAAAAAAAAAKARADAEAGANLAAAARAVAAAEAAASRRNDRQAGIAQAGASAAAETRALASSAAATAKAAAYANADIRALSAAALESSISSSSSTSASSASSSASSGASSDSSSGASSGASSDSSSNSSSDSSSLLGDDASTSASSTAEAESRTSSLILNG

SEQ ID NO: 2559 - protein, 324 aa, Vespa simillima
GKRARRSSNAEASAATSTSSQADSGKNKDACASDAIAGAAASASSQASILGKRARRSSNAEASAATSTSSQADSGKNKDACASDAIAGAAASASSQADSGKNKDACASDAIAGAAASASSQASSLGKRVRRSSNAEASAATSTSSQADSGKNTDASASDAIVSVAASVSSQADSGKGKSAGESNAEASAAASASSQADSGKGKSASESNAEASAAASTSSQADRGKDKDASASNAEASAIASTSSQAGSGKGKSTSESNAETSAAASASSQANTGKDKSTSDSNAEASAAASASSQADRGKGKDASESNAAAWAASASSQSDNS

SEQ ID NO: 2560 - protein, 160 aa, Vespa simillima
GASNAAESSSLWEDSSSENTGASTAAESSSLWEDSSSASARASTAAGSSSAWEDSSITNARESGASGSLSSWEDSSSASAGASNAAESSSLWEDSSSENTGASTAAESSSLWEDSSSASARASTAAGSSSAWEDSSITNARESGASGSLSSWEDSSSASA

SEQ ID NO: 2561 - protein, 279 aa, Vespa simillima
GIAIEGALVGTGAASTAAASAEMLSDTLGLGQSALQAQTASVTQANIASDASNQANRLAAAAAAAMSAAASAQENAASLARASASASESAASASSKAEASAEAAKSSAEKCLLLAQNSAQAQARATEQSESSNRDSAANAAAAAEAERKATLALKAIADAKAKAGVAVAAQSEAAAAAAAAAKARADAEAGANLAAAARAVAAAEAAASRRNDRQAGIAQAGASAAAETRALASSAAATAKAAAYANADIRALSAAALESSISSSSSTSASSASSSASS

SEQ ID NO: 2562 - protein, 355 aa, Vespa simillima
GSSSSSAESSASATASSDASWSASSRSSATGRAPNVILNRAPQLGASAAAIASARASTSANAASDEKSARETRATALARSRAAVTAAARAAARTQEAVAAAKAASRAQALAAAKSSAAISALAAGEAAAQKADAAALAALAANQRSVKAAENGLAVQNRANGEAEQASRAAAANLAAAIRTRDNALETRREAARLKALATAAANANNKATSLAEASANQAAEASSAAEDTSSAQSAAVAQAEAAETLNVNLAILESTQSSRQDSNVAKAEASAAAKASPGTATRDGVNLGLASDAGAAAQLKAQAAALARASSRISSGPALSAWKWRNEDSSESSTSAIASSSASSSSSSRSASG

SEQ ID NO: 2563 - protein, 459 aa, Vespa simillima
GAESSSSSSAASSASSSSSESRGQLLLPLERSSTRSLLDLVSSARSNTAITASSAAAAKATLRAIKAANSAQGEALAQATASAASNAKARATAAAAAQATNAAVNAQGKASAQAIATAEAAEALTKSALQAQSAASSSKSEAAQASTSANAGAGALATASAQALSAKKAALAYASAAADASTAAAKARAAVAAAEAATRTAVQAERDSTNAASLAAKAQAEARAAAAAAAAARLAASAAADASAQADARVRTASIEAAASARTKASNAQATAEAAAIARSSSRDAQANWVDNRSSASSSSASASASVSASASGEADSEADSDASASARSAADSNAGSSSGLAADSAADTAAGSTAGSAARLSAGSAAGSIARSAAGSTAGSSTGSGAGASAEGSSNASSGTSAGASSGASTGASAGASATASADNSADNSAEALSSSSAESSSSSWSSSSQNIWSQDWG

SEQ ID NO: 2564 - protein, 354 aa, Vespa simillima
GPSRLSETSDSSAASWSSSSSSSSSLSSSLASDSASSSASGSASASASASASASASSRNDNSRVKAWKKGRGGSDSLVLSSDSSEDSKARELLETDAGLGAAAALARATADAQARTAASADATANKATAKALVLAEAAVRAENAAIVRIRRALSAAQALVSASNRAKAAARAAREAAANSAAAAAKASTNQVKANADSLVANRAAAALLAAAEEALQKASASQNAAAEAAAKARAAANANAATTRAAASAILAEARARTAITKALAAQSTASAQASSASQVQNRANNLQAETASLAQSRAEAAIAAAAAQAAALAEANAQLARLSKASAGASSEGSASASASASASASSSSSSA

SEQ ID NO: 2565 - protein, 324 aa, Apis mellifera
GAREEVETRDKTKTSTVVKSEKVEVVAPAKDELKLTSEPIFGRRVGTGASEVASSSGEAIAISLGAGQSAAESQALAASQSKTAANAAIGASELTNKVAALVAGATGAQARATAASSSALKASLATEEAAEEAEAAVADAKAAAEKAESLAKNLASASARAALSSERANELAQAESAAAAEAQAKTAAAAKAAEIALKVAEIAVKAEADAAAAAVAAAKARAVADAAAARAAAVNAIAKAEEEASAQAENAAGVLQAAASAAAESRAAAAAAAATSEAAAEAGPLAGEMKPPHWKWERIPVKKEEWKTSTKEEWKTTNEEWEVK

SEQ ID NO: 2566 - protein, 291 aa, Apis mellifera
GRVINHESLKTSEDIQGGYSAGIVGDGSDALGSSIENAQKVARAAENVGLNLELGAGARAASVAAAAQAKNTEAAEAGANAALAAAIAKREEAIKASEIANQLLTNAAKAAEATVSATKRAAQLTAAAKEATRASAAAAEAATEAQVKANADSIITKRAAIAEAQAAAEAQVKAAIARKSAANFLAKAQIAAAAESEATKLAAEAVVALTNAEVAVNQARNAQANASTQASMAVRVDSQAANAEAAAVAQAETLLVTAEAVAAAEAEVANKAATFAKQIVNEKKIHVAKLE

SEQ ID NO: 2567 - protein, 317 aa, Apis mellifera
GVEEFKSSATEEVISKNLEVDLLKNVDTSAKRRENGAPVLGKNTLQSLEKIKTSASVNAKAAAVVKASALALAEAYLRASALSAAASAKAAAALKNAQQAQLNAQEKSLAALKAQSEEEAASARANAATAATQSALERAQASSRLATVAQNVASDLQKRTSTKAAAEAAATLRQLQDAERTKWSANAALEVSAAAAAAETKTTASSEAANAAAKKAAAIASDADGAERSASTEAQSAAKIESVAAAEGSANSASEDSRAAQLEASTAARANVAAAVGDGAIIGLGEEAGAAAQLLAQAKALAEVSSKSENIEDKKFS

SEQ ID NO: 2568 - protein, 315 aa, Apis mellifera
GLEGPGNSLPELVKGSASATASTAVTARSGLRAGQVALASQKDAVLQAQAAASAASEARAAADLTAKLSQESASVQSQAAAKGKETEEAAVGQARAGLESVSMAASATSAAKEASTAAKAAASALSTAVVQAKIAERAAKAEAVASDEAKAKAIAAANLAAEASVAAEAALKAEKVAEEAIARAASAKAAARAAAAALASSKEAATASARNAAESEARNEVAVLIAEIDKKSREIDAASSLNARAAAKASSRNVETATIGANINSSKQVVSIPVEIKKFSEPEVSTSWREDEEVTKEKKEHINLNDFDLKSNVFS

SEQ ID NO: 2569 - protein, 224 aa, synthetic construct
  REGION 1..224: note = Description of Artificial Sequence: Synthetic polypeptide
GANANSDSNSNSNSNANSDANSNSYSNSGANANSNSNSNSNSNANSDANSNSYSNSGANANSNSNSNSNSNAYSDANSNSYSNSGANANSYSNSNSNSNANSDANSNSYSNSGANGNSNSNSNSNSNANSDANSNSYSNSGSNADSNANSDSNSNANSDANSNSYSNSGAYANSNANSNSNSNANSDANSNSYSNSGANANSNSNSNSNSNANSDANSNSYSNS

SEQ ID NO: 2570 - protein, 234 aa, Aposthonia gurneyi
GDGSGSGSGSGSGSGSGSGSGSGSGSGSGSGSDSGSGSGSGHGSSSSSSSGDGSGSGSGSGSGSGSGSGSGSGSGSGSGSGSGSGHGSSSSSSSGDGSGSGSGSGSGSGSGSGSGSGSGSGSDSGSGSGSGHGSSSSSSSGDGSGSGSGSGSGSGSGSGSGSGSGSGSGSGSGSGHGSSSSSSSGDGSGSGSGSGSGSGSGSGSGSGSGSGSGSGSDSGSGSGSGNGSSSSSSS

SEQ ID NO: 2571 - protein, 182 aa, synthetic construct
  REGION 1..182: note = Description of Artificial Sequence: Synthetic polypeptide
GNNLNAQNMAAGSNTQITAGNVIGSAIQNTAAGLAASANIINNGVNRIVTNSNTKGLVNTISRINNLNGRNNGALGLNGNNLQGQVPLVNGVNQAVTNSNTQGLVNTISQINNLNGGNNGALGVNGNNLQGQVPLVNGVNQAVTNSNTQGLVNTISQINNLNGGNNGALGVNGNNLQGQVPL

SEQ ID NO: 2572 - protein, 180 aa, Hilara sp.
GNNLNAQNMAAGSNTQITAGNVIGSAIQNTAAGLAASANIINNGVNRIVTNSNTKGLVNTISRINNLNGRNNGALGLNGNNLQGQVPLVNGVNQAVTNSNTQGLVNTISQINNLNGGNNGALGVNGNNLQGQLPLVNGVNQAVTNSNTQGVVNTNSQISNLNGANNVALGVNGNNLQEAL

SEQ ID NO: 2573 - protein, 182 aa, Hilara sp.
GNSLNAQNMAAGSNTQITAGNVIGSAIQNTAAGLAASANIINNGVNRIVTNSNTKGLVNTISRINNLNGGNNGAVGLNGNNLQGQVPLVNGVNQAVTNSNTQGLVNTISQINNLNGGNNGALGVNGNNLQGQVPLVNGVNQAVTNSNTQGLVNTISQINKLNGGNNGALGVNVNNLQGQVPL

SEQ ID NO: 2574 - protein, 406 aa, Apotrechus illawarra
GRPSGDDDVRIISSTKDVTSTGKRRSNSKNNVAQSSSQKDSIRVKDSNEVIKSISENDPDGTRITTSKGTGVGSETLNENLVELNQNTVSDTNSVETSSDKSNSVTTYDADDRPLTVTDRKGQKDVKSATNAKEDSSEVSENSESETNWQSESDSVEKSVSHPVCGGAESPSSGGPQGSGPQGGGSQGGPSGQGQPNGGIAVSSAEDAAAPQSTRTSTAEGESSSFSAAADVNEGSRKGNVALAGSTAYGRSVTNENSSSGSTQSFSGAAEENVASPDGGSTQRNAAIAGNIAEGQVSSKEEVAEGKATSLSGTIQESDENSQRSAAIAGSSAEANVATREQTSKGKTAAWTGNSQEKSTSPAEISETNIFSSGSYAEGSTLSREKLEQGKSTTWSEESEESRKHG

SEQ ID NO: 2575 - protein, 190 aa, Apotrechus illawarra
GAVAGGVAGASSKASGNEGSGAASGAKTVSVAGTDGSGGALAGSAAGAISKASGDEGSGAASGAKTVSVAGTDGSEGAVAVGVAGASSKASGNEGSGAASGAKTVSVAGTDGSGGAHAGSAAGASSKASGDEGSGAASGAKTVSVAGTDGSGGALAGGAAGASSEASGDEGSGAASGAKAVSVAGTDGSG

SEQ ID NO: 2576 - protein, 141 aa, Cricula trifenestrata
GSSGRGLGGYDGSVDGGYGSGSGSAAAAAAAAAAGSSGRGIGGYDGFVDGGYGSGSGSAAAAAAAAAAAAGSSGTGFGGYDGFGDGGYGSGSSAAAAAAAAAAAAGSSGRGLGGYDGWVDDGYGSGSGSAAAAAAAAAAAA

SEQ ID NO: 2577 - protein, 142 aa, Antheraea yamamai
GNNLHHHDEYVDNHGQLVERFTTRKHYERNAATRPHLSGNERLVETIVLEEDPYGHEDIYEEDVVINRVPGASSSAAAASSASAGSGQTIIVERQASHGAGGAAGAAAGAAAGSSARGGSGFYETHDSYSSYGSGSSSAAAA

SEQ ID NO: 2578 - protein, 134 aa, Antheraea yamamai
GSGAGGVGGGYGGGDGGYGSGSSAAAAAAAAAAAASRRAGHDRAYGAGSAAAAAAAAAAGAGASRPVGIYGTDDGFVLDGGYDSEGSAAAAAAAAAAAASSSGRSTEGHPLLSICCRPCSHRHSYEASRISVHG

SEQ ID NO: 2579 - protein, 186 aa, Antheraea yamamai
GSGAGRAGGDYGWGDGGYGSDSAAAAAAAAAAASGAGGSGGGYGWGDGGYGSDSAAAAAAAAAAASGAGGSGGGYGWGDGGYGSDSAAAAAAAAAAAAGSGAGGRGDGGYGSGSSAAAAAAAAAAAAARQAGHERAAGSAAAAAAAAAAAAASGAGGSGRGYGWGDGGYGSDSAAAAAAAAAAAAA

SEQ ID NO: 2580 - protein, 153 aa, Antheraea yamamai
GSGAGGAGGDYGWGDGGYGSDSAAAAAAAAAAASGAGGAGGGYGWGDGGYGSDSAAAAAAAAAAAAGSGAGGRGDGGYGSGSSAAAAAAAAAAAARRAGHDRAAGSAAAAAAAAAAAAASGAGGSGGGYGWGDGGYGSDSAAAAAAAAAAAAA

SEQ ID NO: 2581 - protein, 347 aa, Antheraea yamamai
GSGAGGVGGGYGWGDGGYGSDSAAAAAAAAAAAAASGAGGAGGYGGYGSDSAAAAAAAAAAAAASSGAGGAGGGYGWGDGGYGSDSAAAAAAAAAAAAGSGAGGRGDGGYGSGSSAAAAAAAAAAAAASGAGGSGGGYGWGDGGYGSGSAAAAAAAAAAAAAGSGAGGVGGGYGWGDGGYGSDSAAAAAAAAAAAAASGAGGAGGYGGYGSDSAAAAAAAAAAAAAGSGAGGAGGGYGWGDGGYGSDSAAAAAAAAAAAAASGAGGRGDGGYGSGSSAAAAAAAAAAAARRAGYDRAAGSAAAAAAAAAAAAASGAGGSGGGYGWGDGGYGSDSAAAAAAAAAAAAA

SEQ ID NO: 2582 - protein, 251 aa, Antheraea yamamai
GSGAGGVGGGYGWGDGGYGSDSAAAAAAAAAAASGAGGSGGYGGYGSDSAAAAAAAAAAAAAGSGAGGVGGGYGWGDGGYGSDSAAAAAAAAAAASGAGGSGGYGGYGSDSAAAAAAAAAAAAAGSGAGGVGGGYGWGDGGYGGYGSDSAAAAAAAAAAAGSGAGGVGGGYGRGDSGYGSGSSAAAAAAAAAAARRAGHGRSSGSAAAAAAAAAAAAASGAGGSGGGYGWDYGSYGSDSAAAAAAAAAAAA

SEQ ID NO: 2583 - protein, 167 aa, Antheraea pernyi
GKNLRHHDEYVDNHGQLVERFTTRKHFERNAATRPHLSGNERLVETIVLEEDPYGHEDIYEEDVVIKRVPGASSSAAAASSASAGSGQTIIVERQASHGAGGAAGAAAGAAAGSSARRGGGFYETHNSYSSYGSGSSSAAAGSGAGGVGGGYGSDSAAAAAAAAAAA

SEQ ID NO: 2584 - protein, 134 aa, Antheraea pernyi
GSGAGGSGGGYGWGDGGYGSGSSAAAAAAAAAAAGSRRSGHDRAYGAGSAAAAAAAAAAGAGASRQVGIYGTDDGFVLDGGYDSEGSAAAAAAAAAAAASSSGRSTEGHPLLSICCRPCSHSHSYEASRISVHG

SEQ ID NO: 2585 - protein, 186 aa, Antheraea pernyi
GSGAGGAGGGYGWGDSGYGSDSAAAAAAAAAAAAASGAGGSGGYGGYGSDSAAAAAAAAAAAAAGAGAGGAGGSYGWGDGGYGSDSAAAAAAAAAAAAGSGAGGRGDGGYGSGSSAAAAAAAAAASAARRAGHDSAAGSAAAAAAAAAAAAASGAGGSGGGYGWGDGGYGSDSAAAAAAAAAAAAA

SEQ ID NO: 2586 - protein, 186 aa, Antheraea pernyi
GSGAGGAGGGYGWGDGGYGSDSAAAAAAAAAAAAASGARGSGGYGGYGSDSAAAAAAAAAAAAAGSGAGGVGGGYGWGDGGYGSDSAAAAAAAAAAAAGSGAGGRGDGGYGSGSSAAAAAAAAAAAARRAGHDRAAGSAAAAAAAAAAAAASGAGGSGGGYGWGDGGYGSDSAAAAAAAAAAAAAA

SEQ ID NO: 2587 - protein, 249 aa, Antheraea mylitta
GSGAGGRGDGGYGWGDGGYGSDSGAAAAAAAAAAAAASGAGGRGDGGYGRGDGGYGSDSAAAAAAAAAAAAGSGAGGQATVVMDGAMAAMVLTRAQQQLAAAAAAASASGAGGSGGSYEWDYGSYGSDSAAAAAAAAAAAAAGSGAGGVGGGYGRGDGGYGSDSAAAAAAAAAAAAGSGAGGRGDGGYGWGDGGYGSDSGAAAAAAAAAAAAASGAGGRGDGGYGWGDGGYGSDPGAAAAAAAAAAAAA

SEQ ID NO: 2588 - protein, 126 aa, Saturnia japonica
GKTLNHIGLHPKGNTRIDEYVDKTGQLYERYTTREEFERNAATLPHLSRNERLLETIIIEEDPSGHEKIYKEDVVLKRVPGASSAASASSAAAAGSGSRRLGRLHGWDGGAYGSDSAAAAAAAAAA

SEQ ID NO: 2589 - protein, 204 aa, Saturnia japonica
GSGAGGLGGLYGLHGGYYGSDSAAAAAAAAAAAAGSGAGGLGGLYGLHGGVYGSDSAAAAAAAAAATAGSGAEGLGGLYGLHGGYYGSDSGAAAAAAAAAAAGSGAGGLGGHYGLHGGVYGSDSAAAAAAAAAAAAGSGAGGLGGLYGLHGGVYGSSSSRRDSSSASSAAAAAAAAAGSSAASSERVYESESAAAAAAAAAAAA

SEQ ID NO: 2590 - protein, 238 aa, Saturnia japonica
GSGSRGLGGLYGWDGGVYGSDSAAAAAAAAAAAAGSGVSGLGGLYGWDGGVYGSDSAAAAAAAAAAAAGSGSRGLGGLYGWNGGVYGSDSAAAAAAAAAAAAGSGVSGLGGLYGWDRGVYGSDSAAAAAAAAAAAAGSGSRGLGGLYGWNGGVYGSDSAAAAAAAAAAAAGSGVSGLGGLYGWDGGLYGSDSAAAAAAAAAAAAGSGVSGLGGLYGWDGGLYGSDSAAAAAAAAAAAA

SEQ ID NO: 2591 - protein, 238 aa, Saturnia japonica
GSGAGGLGGLYGYHGGVYGSDSAAAAAAAAAAAAGSGISGLGGLYGWDGGLYGSDSAAAAAAAAAAAAGSGSRGLGGLYGWDGGVYGSDSAAAAAAAAAAAAGSGSRGLGGLYGWDGGVYGSDSAAAAAAAAAAAAGSGVSGLGGLYGWDGGLYGSDSSAAAAAAAAAAAGSGSRRLGGLYGWDGGVYGSDSAAAAAAAAAAAAGSGVGGLGGLYGWDGGVYGSDSAAAAAAAAAAAA

SEQ ID NO: 2592 - protein, 136 aa, Rhodinia fugax
GQYIDDDIYRLKRTYGETSNTRSDEYDVDKFGRLYERTTTRKKFEGNSKVSPYISGDEKVVETIVYENNPVGRGTIYEEDVVIKKVPDETSIGTAASSASAGAGLGIAPTIIVERPFENYGGGAAAGAAAAAAAAA

SEQ ID NO: 2593 - protein, 184 aa, Rhodinia fugax
GSSGVGYERGYGSDSAAAAAAAAAAAAAGSGSRGLGGYYGDGLLDGGYGSGSAAAAAAAAAAAADSGSRGLGGYYGDGLLDGEYGSGSAAAAAAAAAAAAGSSGVGYGRRYGSDSAAAAAAAAAAAAGSSSDYTVYESSRRGSSSSAAAAAAAAAAAGSSEAGYERGYESDSAAAAAAAAAAAA

SEQ ID NO: 2594 - protein, 262 aa, Rhodinia fugax
GSGTRGLGGYYGKDGGLLLDGEYGSGSAAAAAAAAAAASGSRGLGGFYGDGLLDGGYGSGSAAAAAAAAAAAGSGSRGLGGFYGDGLLDGGYGSGSAAAAAAAAAAAGSGSRGLGGYYGDGILDDGYGSGSAAAAAAAAAAAAGSGSRGLGGYYGDGLLDGEYGSGSAAAAAAAAAAAAGSSGVGYGRRYGSDSAAAAAAAAAAAAGSSSDYTVYESSRRGSSSSAAAAAAAAAAAGSSEAGYERGYESDSAAAAAAAAAAA

SEQ ID NO: 2595 - protein, 189 aa, Rhodinia fugax
GSGSRGLGGFYGDGLLDGGYGSGSAAAAAAAAAAAGSGSRGLGGYYGDGLLDGGYGSGSAAAAAAAAAAAGSGSRGLGGYYGDGLLDGEYGSGSAAAAAAAAAAAEGSSGVGYGRRYGSDSAAAAAAAAAAAAGSSSDYTVYESSRRRSSSSAAAAAAAAAAAGSSEAGYERGYESDSAAAAAAAAAAA

SEQ ID NO: 2596 - protein, 221 aa, Rhodinia fugax
GSGSRGLGGFYGDGLLDGGYGSGSAAAAAAAAAAAGSGSRGLGGYYGDGLLDGGYGSGSAAAAAAAAAAAGSGSRGLGGYYGDGLLDGGYGSGSAAAAAAAAAAAGSGSGGLGGYYGDGLLDGEYGSGSAAAAAAAAAAAEGSSGVGYGRRYGSDSAAAAAAAAAAAGSSSDYSVYKSSRRESSSSAAAAAAAAAAAGSSEAGYERGYESDSAAAAAAAAA

SEQ ID NO: 2597 - protein, 206 aa, Galleria mellonella
GDAIDDSLLNFNNENFIEIGESTTAEVDVENGTLVERETTRKKYERDGDITPNISGEDKIVRTFVIETDASGHETVYEEDVVIKRKPGQQGVTERTTIGRRQTGISAAPVPAPSSQAPTVVVESNSPIAPAPVSGPVSIGPQLGAVGPYGPSRSSTATTTSGTGVVQQIRTDSTGSSAASAATGASSVAPVIVIEDGSSAASAAAA

SEQ ID NO: 2598 - protein, 102 aa, Galleria mellonella
GSGASGPGGLGLGGLGPYGGIGPNVVSAASAPVVGPSVSSVGPVGAQVIEIGSPVVPSVSRTGSVSRVSVSGRPGVRVPCSLTRRQFVVKIGTRRQPCGYCS

SEQ ID NO: 2599 - protein, 480 aa, Galleria mellonella
GSGASGVGGLGLGALGPLGGIGQSGVSSATTSGAGLGGVGAVGASGLGGLGGAGASAAGSAGAGLGGVGVGGSSGSSAASAASGASGAGEVILIDDRSSAASRAAAGSGASGVGGLGLSGLGPIGGIGPIGATSASTSGAGLGGVGAAGASGLGGLGGAGASAAGSAGAGLGGIGAGGSSGSSAASAASGASGAGEVIVIDDRSSAASAAAASSGASGLGGLGLGGLGPYGGIGLNGVSSASALGAGLGGVGTAGASGLGGLGGAGVSAVGPAGAGLGGVGAGGSSGSSAASAASARSGPAPVIVIEDGSSAASAAAAGSGASGLGGLGLGAWGPLGGIGPNEVSSASATGSAAGSTGAGLGGSGAAGSSAASAASGAAGPAPVIVIEDGSSAASAAAAGSGASGLGGLGLGAMGTLGGIGPNGVSSASATGSAAGSIGSGLCGSGAAGSSLASAASGAAGAAPVIVIEDGSSAASAAAA

SEQ ID NO: 2600 - protein, 561 aa, Galleria mellonella
GSGASGVGGLGLGALGPLGGIGPIGASSAGASGAGLGGVGAAGTSGLGGIGGVGASTAGSAGAGLGGIGAGGSSGSSAASAASGASGAGEVIVIDDRSSAASAAAAGSGASGPGGLGLGVWGPLGGIGPIGASSASASGAGLGGVGAAGTSGLGGLGGAGASAAGSAGAGLGGIGASGSSGSSVASAASGTSGAGEVIVIDDRSSAASAAAAGSGASGLGGLGLGGLGPYGGIGLNGVSSASALGAGLGGVGTAGASGLGGLGGTGASAAGSAGAGLGGVGAGGSFGSSAASAASGASGAGEVIVIDDRSSAASAAAAGSGASGPGGLGLGVWGPLGGIGPNGVSSASATGSAAGSTGAGLGGSGAAGSSAASAASGAAGPAPVIVIEDGSSAASAAAAGSGASGLGGLGLGAWGPLGGIGPNGVSSASATGSAAGSTGAGLGGSGAAGSSAASAASGAAGPAPVIVIEDGSSAASAAAAGSGASGLGGLGLGAWGPLGGIGPNGVSSASATGSAAGSTGAGLGGSGAAGSSAASAASGAAGPAPVIVIEDGSSAASAAAA

SEQ ID NO: 2601 - protein, 131 aa, Bombyx mori
GNINDFDEDYFGSDVTVQSSNTTDEIIRDASGAVIEEQITTKKMQRKNKNHGILGKNEKMIKTFVITTDSDGNESIVEEDVLMKTLSDGTVAQSYVAADAGAYSQSGPYVSNSGYSTHQGYTSDFSTSAAV

SEQ ID NO: 2602 - protein, 150 aa, Bombyx mori
GAGAGSGAASGAGAGAGAGTGSSGFGPYVANGGYSRREGYEYAWSSKSDFETGSGAASGAGAGAGSGAGAGSGAGAGSGAGAGSGAGAGGSVSYGAGRGYGQGAGSAASSVSSASSRSYDYSRRNVRKNCGIPRRQLVVKFRALPCVNCG

SEQ ID NO: 2603 - protein, 403 aa, Bombyx mori
GAGAGSGAGAGSGAGAGSGAGAGSGAGYGAGVGAGYGAGYGAGAGAGYGAGAGSGAGSGAGAGSGAGAGSGAGAGSGAGAGSGAGAGSGAGAGSGAGAGSGAGAGSGAGAGYGAGYGAGAGAGYGAGAGSGAGSGAGAGSGAGAGSGAGAGSGAGAGSGAGAGSGAGAGSGAGAGSGAGAGYGAGVGAGYGAGYGAGAGAGYGAGAGSGAGSGAGAGSGAGAGSGAGAGSGAGVGSGAGAGSGAGAGSGAGAGSGAGAGYGAGYGAGAGAGYGAGAGSGAGSGAGAGSGAGAGSGAGAGSGAGAGSGAGAGSGAGAGSGAGAGSGAGVGYGAGVGAGYGAGYGAGAGAGYGAGAGSGAASGAGAGAGAGAGTGSSGFGPYVANGGYSGYEYAWSSESDFGTGS

SEQ ID NO: 2604 - protein, 319 aa, Bombyx mori
GAGAGSGAGAGAGAGAGSGAGAGYGAGVGAGYGAGYGAGAGAGYGAGAGSGTGSGAGAGSGAGAGYGAGVGAGYGAGAGSGAAFGAGAGAGAGSGAGAGSGAGAGSGAGAGSGAGAGSGAGAGYGAGYGAGVGAGYGAGAGSGAASGAGAGSGAGAGSGAGAGSGAGAGSGAGAGSGAGAGYGAGVGAGYGAGYGAGAGAGYGAGAGSGAASGAGAGSGAGAGAGSGAGAGSGAGAGSGAGAGSGAGSGAGAGSGAGAGSGAGAGYGAGAGSGAASGAGAGAGAGAGTGSSGFGPYVANGGYSGYEYAWSSESDFGTGS

SEQ ID NO: 2605 - protein, 391 aa, Bombyx mori
GAGAGSGAGAGSGAGAGYGAGYGAGVGAGYGAGAGVGYGAGAGAGYGAGAGSGAASGAGAGAGAGAGSGAGAGSGAGAGAGSGAGAGYGAGYGIGVGAGYGAGAGVGYGAGAGAGYGAGAGSGAASGAGAGSGAGAGSGAGAGSGAGAGSGAGAGSGAGAGSGAGAGYGAGYGAGVGAGYGAGAGVGYGAGAGAGYGAGAGSGAASGAGAGAGAGAGAGSGAGAGSGAGAGSGAGAGSGAGAGSGAGAGSGAGAGSGAGAGSGAGAGSGAGAGYGAGVGAGYGAGYGGAGAGYGAGAGSGAASGAGAGSGAGAGSGAGAGSGAGAGSGAGAGSGAGAGYGAGAGSGAASGAGAGAGAGAGTGSSGFGPYVNGGYSGYEYAWSSESDFGTGS

SEQ ID NO: 2606 - protein, 169 aa, Anagasta kuehniella
GADILETGILGGNVREVSESTTDNFTTDGNGNVTEVKTTHKEFRRQGEVPNNISGEDKLVRTFVIETDASGNEVIYEEDVVIHKVPGTSATTKTTTARRQLGGIGGTGAASSSAATSPPRPTSPYGPNGSSSAATSSASGSAPVIVIEENQSSAAAAASSSSSGPNGLL

SEQ ID NO: 2607 - protein, 190 aa, Anagasta kuehniella
GPYGPNGSSASSAASSGAAGAGGLNGIYGSNGALLSGAAGVNGLNGLYGPNGSSASSAGAAGIGGLNGLNGSNGSSSAASSSASGSGPVIVIEENQSSAAAAASSSSSGPNGLLGPYGPNGSAASSAAASNAGNNGPVVIIERGSSSSAAAGSSSSAPYVLPGVRGPCRLTRRQFVVKIGSRRQPCLTCS

SEQ ID NO: 2608 - protein, 228 aa, Anagasta kuehniella
GPYGPNGSAASSAAASGAAGAGGLNGLYGSNGALLSGAAGVNGLNGLYGPNGSSASSAGAAGIGGLNGLNGSNGSASAASSSASGSGPVIVIEENQSSAAAAASSSSSGQNGLLGPYGPNGSSASSAASSGAAGAGGLNGIYGSNGALLSGAAGANGVNGLYGPNGSSASSAGAAGIGGLNGLNGSNGSASAASSSASGSGPVIVIEENQSSAAAAASSSSSGPNGLL

SEQ ID NO: 2609 - protein, 228 aa, Anagasta kuehniella; identical to SEQ ID NO: 2608

SEQ ID NO: 2610 - protein, 308 aa, synthetic construct
  REGION 1..308: note = Description of Artificial Sequence: Synthetic polypeptide
GYGSGSSAAAAAAAAAAASRRAGHERAAGSAAAAAAAAAAAASGVGRSGGSYGWGDGGYGSDSAAAAAAAAAAAAAASGAGGAGVCRGYGGYGSDGSGSAAAAAAAAAAAGSGAGGVGGGYGWGDGAYGSDSAAAAAAAAAAAAGSGAGGRRGYGAYGSDSSAAAAAAAAAASGAGGSGGGYGWGDGGYGSDSAAAAAAAAAAAAAAGSGAGGIGGGFGRGDGGYGSGSSAAAAAAAAAAAARRAGHGRSAGSAAAAAAAAAAAAASGAGGSGGSYGWDYESYGSGSAAAAAGSGAGGSGGGYGWGDG

SEQ ID NO: 2611 - protein, 91 aa, Antheraea pernyi
GYGAGSAAAAAAAAAAGAGASRQVGIYGTDDGFILDGGYDSEGSAAAAAAAAAAAASSSGRSTEGHPLLSICCRPCSHSHSYEASRMPVHS

SEQ ID NO: 2612 - protein, 156 aa, Bacillus cereus
GATGATGPQGIQGPAGATGATGATGPQGPQGIQGPAGATGATGAQGAQGPAGATGPQGPQGIQGPAGATGATGAQGAQGPAGATGATGATGAQGPQGVQGPAGATGATGAQGPAGATGATGATGAQGPQGVQGPAGATGATGAQGPQGVQGPAGAT

SEQ ID NO: 2613 - protein, 171 aa, Bacillus cereus
GATGAQGPQGIQGPAGATGATGPQGPQGIQGPAGATGATGAQGAQGPAGATGATGAQGAQGPAGATGATGATGAQGPQGVQGPAGATGAQGAQGVQGPAGATGATGAQGPQGVQGPAGATGATGAQGPQGVQGPAGATGATGAQGPQGVQGPAGATGATGAQGPQGVQGPA

SEQ ID NO: 2614 - protein, 340 aa, Bacillus cereus
GLQGPQGIQGVPGPVGATGPEGPQGIQGIQGVQGATGPQGPQGIQGIQGVQGITGATGVQGATGIQGIQGEIGATGPEGPQGVQGAQGAIGPTGPMGPQGVQGVQGIQGATGAQGVQGPQGIQGIQGPTGATGDMGATGATGEGATGPTGVTGPTGVTGPSGGPAGPTGPTGPSGPAGVTGPSGGPPGPTGATGATGITGDTGATGSTGVTGATGETGATGVTGLQGPQGIQGVQGEIGPTGPQGVQGPQGIQGVTGATGDQGPQGIQGPQGDIGPTGPQGIQGPQGSQGIQGATGGTGAQGPQGIQGPQGDIGPTGPQGPTGIQGIQGEIGPTGPEGPE

SEQ ID NO: 2615 - protein, 282 aa, Bacillus thuringiensis
GATGATGPQGAQGPAGATGATGPQGVQGNTGATGATGPQGAQGPAGATGATGPQGVQGNTGATGATGPQGAQGPAGATGATGPQGVQGNTGATGATGPQGVQGNTGATGATGPQGVQGNTGATGATGPQGVQGNTGATGATGPQGVQGPAGATGATGPQGVQGPAGATGATGPQGNTGATGATGPQGAQGPAGATGATGPQGVQGNTGATGATGPQGAQGPAGATGATGPQGVQGNTGATGATGPQGVQGNTGATGATGPQGVQGPAGATGATGPQGVQGNT

SEQ ID NO: 2616 - protein, 384 aa, Bacillus licheniformis
GATGPTGATGPTGATGPTGVTGPTGVTGATGPTGVTGPTGAMGPTGATGATGPTGVTGSTGVTGATGATGPTGVTGPTGAMGPTGATGATGATGATGATGATGPTGVTGATGATGPTGVTGATGATGPTGATGATGPTGATGPTGATGATGPTGATGAMGPTGATGPTGATGPTGVTGSTGATGATGPTGATGAMGPTGATGPTGATGPTGVTGSTGATGATGPTGATGAMGPTGATGPTGATGPTGVTGPTGETGATGPTGATGPTGVTGATGPTGVTGPTGATGATGPTGATGATGATGPTGVTGATGVTGSTGATGPTGATGPTGATGATGATGPTGVTGATGATGPTGVTGPTGATGATGATGATGATGATGPTGVTGAA

SEQ ID NO: 2617 - protein, 243 aa, Bacillus licheniformis
GPTGATGPTGTTGAMGPTGATGPTGTTGAMGPTGATGPTGTTGAMGPTGATGPTGTTGAMGPTGATGPTGTTGAMGPTGATGPTGTTGAMGPTGATGPTGATGPTGVTGSTGATGATGATGPTGATGAMGPTGATGPTGATGPTGVTGATGPTGVTGPTGATGATGPTGATGATGATGPTGPTGVTGAAGATGPTGVTGATGVTGSTGATGATGATGATGPTGVTGAAGATGPTGAAGATGPA

SEQ ID NO: 2618 - protein, 210 aa, Neospora caninum
GGAEEKAMKPSESPESAKNEAGGAEEKAMKPSGSAESAKNEAGGAEEKETKPSESPESAKNEARGAEGKETKPSESPESAKNEAGGAEEKETKPSESPESAKNEAGGAEDKAMKPSESAESAKTEAGGAEEKAMKPSESPESAKNEAGGAEETSMKPSGSAESAKNEAGGAEEKETKPSESPESAKNEARGAEGKETKPSESPESAKNEA

SEQ ID NO: 2619 - protein, 301 aa, Danio rerio
GDSNTDTNTDTNTDKNFDANTDSNTDSNTETNTDSNTETNTDSNTDTNTDSNTDTNTDKNTDTNTDSNTDTNTDTNTNTDTNTDTNTNTDTFTDKNTDSNTDTNTDTHTDTNSDSNTDTNKDTNTDKNTDTNTDSNTDSNTDTNTDTNTDTNTDKNFDANTDSNTDSNTDTNTDSNTETNTDSNTDTNTDSNTDTNTDKNTDTNTDSNTDTNTDKNTDTNTDSNTDTNTDSNTDTNTDKNTDTNTDSNTDTNTDSNTDTNMDTNTDKNTDTKTDSNTDSNTDTNTDSNTDKNTDTKTDSNT

SEQ ID NO: 2620 - protein, 193 aa, Danio rerio
GDIRDARDVRDARDIRDIRDARDIRDPRDIRDIRDSRDIRDIRDARDIRDMRDPRDVRDVRDPRDVRDVRDIRDVRDVRDIRDSREVRDGRDAREVRDIRDAREVRDIRDAREVRDIRDAREVRDIRDPREVRDTREVRDAREVRDARDAREVREAREARDVRDARDVRDIREAREVRDVRDAREVRDIRDVR

SEQ ID NO: 2621 - protein, 174 aa, synthetic construct
  REGION 1..174: note = Description of Artificial Sequence: Synthetic polypeptide
GKESDRSKERDRERDRSRERDREQGHSREKEREHSKERDRSRGRESDRGKESDRGKESERGKESERGKESERGKESERGKEFDRGKESDRGKESDRGKESDRGKESERGKESERGKESDRGKESDRGKESDRGKESDRGKESDRGKESDRGKESDRGKESDRGKESDRGKESDR

SEQ ID NO: 2622 - protein, 119 aa, Atta cephalotes
GRPEMYPEGVRPGTVISGAERTYPGGVRPGTVTPGTEEIYPGGARPGTVTPGIEEIYPGGVRPGTVIPGAERTYPGGVHPDIVLPGVEKSYPIDIRPGTVTPGADGMYPESVRPGSVTP

SEQ ID NO: 2623 - protein, 224 aa, Ureaplasma urealyticum
GSTTQPGSGSTTQPGSGSTTQPGSGSTTQPGSGSTTQPGSGSTTQPGSGSTTQPGSGSTTQPGSGSTTQPGSGSTTQPGSGSTTQPGSGSTTQPGSGSTTQPGSGSTTQPGSGSTTQPGSGSTTQPGSGSTTQPGSGSTTQPGSGSTTQPGSGSTTQPGSGSTTQPGSGSTTQPGSGSTTQPGSGSTTQPGSGSTTQPGSGSTTQPGSGSTTQPGSGSTTQPGS

SEQ ID NO: 2624 - protein, 160 aa, Bombus terrestris
GSPRTTTGGGIAYPGGIPTTTTGGGIAYPGNIPTTTTGGGVAYPGNIPTTTTGGGTVYPGGVPSTTITGSTVYPGGVPSTITGGDVAYPGDVPSTTITGTVYPGGVSSDGAAYPGSMPGTTIGGGVTYPGSIPSTTTGGGIAYSGSIPGITTGGGVTYPR

SEQ ID NO: 2625 - protein, 210 aa, Bombus terrestris
GVPGTITGADAVHPEGVPGATTGLSITYPGGVPGTVTGGDVVHPKSAPGTTTGRGVTYPGGVPGTVTGGGVVNPKSAPGTTTGHGVAYPGGVPRTLTGGSTVYPGGVSGITTGGHVAYPGGVAATTIGGNVAYPGGVPSTTTGGGVTYPGGVLGTTTGDGAVYPGGLPGTATVGGITYPGIISGTTTGSGIAYPGGVPGTTTSDDVTYPG

SEQ ID NO: 2626 - protein, 160 aa, Bombus impatiens
GHHGIPWDTMEYPGTPWNTLGHHGIPWDTMEYPGTPWNTLGHHGIPWDTMEYPGTPWNTLGHHGIPWDTMEYPGTPWNTLGHHGIPWDTMEYPGTPWNTLGHHGIPWDTMEYPGTPWNTLGHHGIPWDTMEYPGTPWNTLGHHGIPWDTMEYPGTPWNTL

SEQ ID NO: 2627 - protein, 160 aa, synthetic construct
  REGION 1..160: note = Description of Artificial Sequence: Synthetic polypeptide
GIHQEATSEIHPEATSEIPPEITSEIHPEATGEIHPETISGIHQEATSEIHPEATSEIPPEITREIHPEATGEIHPETISGIHQEATSEIHPEATSEIPPEITSEIHPEATGEIHPETISGIHQEATSEIHPEATSEIPPEITREIHPEATGEIHPETIS

SEQ ID NO: 2628 - protein, 138 aa, Bombus impatiens
GLPPQTTRELHSQSASDLHRPSTSQIHRRPTSKIHPDPTCEIHQASTSEKHPEATCEIHPESTSEILPETTNDIHRPSARQINRPSTSEIPREITREIHPEATSETHPETTNEIHRPSTSQIHRPSTSQILPETRSEL

SEQ ID NO: 2629 - protein, 243 aa, synthetic construct
  REGION 1..243: note = Description of Artificial Sequence: Synthetic polypeptide
GPWSKCSKHCGEGGEQSRGIKCEQVISGGIPTVVDDSQCLEKVGPKGPTKQECNKNVTCPQFHVGPWKPCDHLCGPGKQTRKVTCYMKVNGKIQLLKDQACEGEVPKSEKPCELRPCAGLDWVTSDWSGCDDKCGLTEETRTTYCATQDGTVYPDEKCDAEKKPELTRDCEAEKDCEFLWFASQWSDCSAKCGSGVQTRKVFCGTFDDETVKKVPDEKCDADKKFNETKSCIAKEECKGEWFA

SEQ ID NO: 2630 - protein, 130 aa, Bombus impatiens
GATAESAATTEPGATTESAATEITESTESGATEVTESTESGATTESGATTESGATTESGATTESGATTESGATIESGATTESGATTESGATTESGATTESAATTEPGTTIESGATTESGATTESGATTES

SEQ ID NO: 2631 - protein, 255 aa, Drosophila yakuba
GIGGQTGAGQPGYGSQPGVAGQTGAGQPGYGSQPGVAGQNGAGQPGYGSQPGVAGQNVAGQPGYGTQPGIGGQTGAGQPGYGSQPGIGGQTGGGQPGYGSQPGIGGQTGAGQPGYGSQPGVGGQTGAGQPEVGGQTGAGQPGFGAQPGIGGQTGAGQPGYGTQPGIGGQTGAGQPGYGSQPGIGGQTGGGQPGYGSQPGIGGQTGAGQPGYGSQPGVGGQTGAGQPGYGSQPGVGGQTGAGQPGYGSQPGVGGQT

SEQ ID NO: 2632 - protein, 181 aa, Drosophila yakuba
GVGGQTGAGQPGFGAQPGIGGQTGAGQPGYGTQPGIGGQTGAGQPGYGSQPGVGGQTGAGQPGVGGQTGAGQPGFGAQPGIGGQTGAGQPGYGTQPGIGGQTGAGQPGYGTQPGIGGQTGSGQPGYGSQPGIGGQTGAGLPGYGTQPGIGGQTGAGQPGYGSQPGVAGQTGAGQPGYGTQP

SEQ ID NO: 2633 - protein, 272 aa, Pseudomonas syringae
GYGSTQTAGGDSALTAGYGSTQTAREGSNLTAGYGSTGTAGSDSSLIAGYGSTQTSGEDSSLTAGYGSTQTAQEGSNLTAGYGSTGTAGSDSSLIAGYGSTQTSGGDSSLTAGYGSTQTAQEGSNLTSGYGSTGTAGADSSLIAGYGSTQTSGSDSALTAGYGSTQTAQEGSNLTAGYGSTGTAGSDSSLIAGYGSTQTSGSDSSLTAGYGSTQTAQEGSNLTAGYGSTGTAGVDSSLIAGYGSTQTSGSDSALTAGYGSTQTAQEGSNLTA

SEQ ID NO: 2634 - protein, 150 aa, Phytophthora infestans
GAGLNAGAGLNAGAGLNAGAGLNAGAGLKVGAGLNAGAGLNVGAGLNTGARFSANAGLKASAGLNAGAGLNAGAGLKVGAGLNAGAGLNVGAGLNTGAGLNANAGLKANAGLNAGAGLKVGAGLNVGAGLTAGTGLNANAGLKANAGLNA

SEQ ID NO: 2635 - protein, 197 aa, Phytophthora sojae
GVCGCSGGRQLVNGVCKCTGGQELVGGSCACTCGQELVNGVCTCPGGQKLVGDKCMCTGGQTMVNDVCACTGGQTLVDGVCACTGGQKLVDGVCTCTGGRSLVDGVCACTGGQLFANDVCACPALMSLKNGECSCDGGRAEVRPDVCECTGGQEIANGECACTGGQTLVDGVCRCPSLMSLEHGVCTCDGGRTEVST

SEQ ID NO: 2636 - protein, 172 aa, Polysphondylium pallidum
GSTTTSGNGSGTSSTTTNNGSGAGSTTTSGNDSGVGSTTTSGNGSGAESTTNGNDSGVGSTTTSGAASTATSANGSGAESTTTSGNGSSSGSTTTSGNGSGAASTTNGNDSGVGSTTTSGAASTTTSGNGSGVGSTTSSGNGSGTGSTSSGIGSTTTSVNGSGTGTTTSSGI

SEQ ID NO: 2637 - protein, 156 aa, Rhipicephalus pulchellus
GGLGVGGLGVGGGLGGGSHYSSSSYSSGHGSGVGVGAGLASGAALGSGAGLATGAALGSGAGLASGAGLGYGAGLASGAALGSGAGLATGAALGTGAGLASGAALGSGAGLATGAALGSGAGLAAGAGLGYGAGHASGAALGSGAGLASGAALGSG

SEQ ID NO: 2638 - protein, 215 aa, Culex quinquefasciatus
GTGVSGGPGYPGTVGAGQYPGVGGLPGTSGQYPGGQYPGTGAGGVPGYSGYPGTSGAGHYPGTSGTPGAGTGPGTGGIGQHGGQLSTGTGAGVGHQGSGVGQYPGTGATGGYPYPGTTGQYPGTSGIPGAGTGQYYPGGTGVGGLPGGVGQHGGQLSTGAGTGLGQQGGGVGQYPGTGVGGGPGYPYHHGTSGQYPGGQYPGTGAAGGPGYTGYP

SEQ ID NO: 2639 - protein, 140 aa, Tribolium castaneum
GPAPYPTAPGGVGKITYPVGPGGVPGYPGTPTYPSIPGYPTPGHPVTEPGYPGVPSYPGAPRPGVPSGPSGPSYPGGQIPGYPGVPSPGFPGGPPPGYPGVPTAGYPGIPTGPGVPSYPGGPSVSFPGVPSVPPGVPSYP

SEQ ID NO: 2640 - protein, 208 aa, Tribolium castaneum
GAPSPGYPGAPSSGYPGAPSPGYPGAPSPGYPGAPSPGYPGAPYPGYPEAPTPSYPGAPTPGYPGAPSPGYPGAPAPGYPEAPYPGYPGVPSPGYPGAPSPGYPGAPSPGYPGAPSSGYPGAPSPGYPGAPSPGYPGAPSPGYPGAPYPGYPEAPTPSYPGAPTPGYPGAPSPGYPGAPAPGYPEAPYPGYPGVPSPGYPGAPSPGYP

SEQ ID NO: 2641 - protein, 265 aa, Streptococcus pyogenes
GLTGPAGQDGKQGPQGPRGLTGPAGQDGKQGPQGPRGLTGPAGQDGKQGPQGPRGLTGPAGQDGKQGPQGPRGLTGPAGQDGKQGPRGLTGPAGQDGKQGPRGLTGPAGQDGKQGPQGPRGLTGPAGQDGKQGPQGQPGQVGPRGLQGPQGPRGDKGETGPQGPAGKDGEAGAQGPVGPAGPQGPRGDKGETGPQGPAGKDGERGPVGPAGKDGQNGKDGLPGKDGKDGQNGKDGLPGKDGKDGQDGKDGLPGKDGKDGQPGKPA

SEQ ID NO: 2642 - protein, 180 aa, Candidatus microthrix
GDTGPTGPTGASGPSGETGPTGPTGVSGPSGETGPTGPTGASGPSGDTGPTGPTGASGPSGDTGPTGPTGASGPSGETGPTGPTGASGPSGETGPTGPTGASGPSGETGPTGPTGASGPSGETGPTGPTGVSGPSGDTGPTGPTGATGPSGETGPTGPTGATGPSGETGPTGPTGATGPS

SEQ ID NO: 2643 - protein, 274 aa, synthetic construct
  REGION 1..274: note = Description of Artificial Sequence: Synthetic polypeptide
GNQILDPRTCVCKKCIATACPDNSHYSFSTCRCECPQHQKCPHGQYFNSETCKCGCSPHIKCHSPRVLNKDACKCECPKNVHCLPPLTFDERTCACHCPEHHSHCPTGKIYSYTECGCICSEKAYCHLPRFFNNETCKCECKGERNCVHPKVYSETNCNCQCPEDDYCPRHKTINPETCECSCPAELSCRSPQVLNDKTCKCVCPPHTRRCPPGKELDDFTCECSCPEVFCPLPKLQNPYTCKCACPDTLTCPYGQVVDPENCQCSCPKKLSCS

SEQ ID NO: 2644 - protein, 162 aa, Acyrthosiphon pisum
GNQDHGYGVRPLVDGQYRGSGTNNKLPGNQYQGYGITPSIDGQYTSSGTNNKLPGNQNQGYGINPSIVGQYPGLGTNNNLPGNQDHGYGVRPLVDGQYRGSGTNNKLPGNQYQGYGITPSIDGQYTSSGTNNKLPGNQNQGYGINPSIVGQYPGLGTNNNLP

SEQ ID NO: 2645 - protein, 165 aa, Acyrthosiphon pisum
GSGGSGVQQSGNVPSGVNINQIQPSYGQPHGTLYSGGTGVQQPGYASSGENLNPIQPSYGQPHGTLGSGGSGVQQSGNVPSGVNINQIQPTYGQPQGTLGSGGSGVQQSGNVPSGGNLNPIQPSYSQPHGTLYSGGTGVQQPGYASSGGNLNPIQPSYGQPHGTL

SEQ ID NO: 2646 - protein, 268 aa, Caenorhabditis brenneri
GGDLPDKPIPGGQEEVERPWPETGDLPDKPIETDQFDTTAGPSFWDTTHSDHTESMEIFEVPPNEIDDGGDLPDKPIPGGQVEQPGPGIDGLPDKPIETDPFDTTTDGSFWDTTHSDHTEPMEIFEVPGSEIDDGGDLPDKPIPGGQVEQPWPGPDDLPDKPLNIDPSDTTTDSSFWDTTHSDHTVPMEVFEVPPNEIDEGGGLPDKPIPSDRDHVEQPEPETGDLPDKPIGINPSDTTTDSSFWDTTHFDHTVPMEIFEVPPSEIDE

SEQ ID NO: 2647 - protein, 339 aa, Caenorhabditis brenneri
GGVVPVIPGGPNIPGGPGDPIGPGGPVEPGTPEGPDGPGIPGGPNGPGGPGITEGPNESNHLTTKIPITTTTDRNGGGVVPVLPGGPGGPRKPGGPSGPNGPGNPGGPVNPGGPTGPDGPGNPPGSETPGGSGTPIGPNGPVGPGSPDGPRGPSGPDGPKGGTQNTGSPSGPSGPDNPNGPGGPSNPGGPSGPTGPEGPDESNRLSTKIPITSTTTDRVGGGIPVIPGGPNIPGGPRGPSGPSIPGEPAGPDGSGGPGGPVNPGGPTGPHGPGNPPGPSIPGGPGGPDGPGSPSGPSGPDSPGSPNGPSNTGSPRGPSGPDGPNQQPTSKPEKQNEQSS

SEQ ID NO: 2648 - protein, 280 aa, Burkholderia pseudomallei
GTNSTASGDNSTASGTNASATGENSTASGTNASATGENSTATGTASTASGSNSTANGTNSTASGENSTATGTDSTASGSNSTANGTNSTASGDNSTASGTNASATGENSTATGTDSTASGSNSTANGTNSTASGDNSTASGTNASATGENSTATGTDSTASGSNSTANGANSTASGDNSTASGTNASATGENSTATGTDSTASGSNSTANGTNSTASGNNSTASGTNASATGENSTATGTDSAASGTNSTANGTNSTASGDNSTASGTNASATGENSTAT

SEQ ID NO: 2649 - protein, 250 aa, Mustela putorius furo
GSGLSGVSMAGSECSGASMAGSGHSRVSVAGSEYTGASMAGSGHSRASGAGSEWSRTSMAGSGLSGVSVAGSEYPGASMAGSGHSGAPVSGSGSSGASMAGSGLSRASGAGSECSRTSVAGSGHSRTSVAGSECSRVSRAGSECSRASVADSGYSGASEVGSRSSRASLAGLVHFGASIACSGHSEASMEGLECSGASVPDSRHSVASVTDGGHSVASVADSVHSVVSMTGLGQFVSSVSEPGHSTASVA

SEQ ID NO: 2650 - protein, 152 aa, Candida parapsilosis
GIATPSDTNSYESTTTVTDMTTSTHTTVVTTTWLVTNSDGSVETETGIATPSDTNSYESTTTVTDTTFTTETTVITTTWLVTKSDGSVETETGVITQSGDSSSTITTFETSSDTNSYDSTTTVTDTTTTTETTVFTTTWIVTKSDGSVETET

SEQ ID NO: 2651 - protein, 360 aa, Candida parapsilosis
GEPTGSGSESTGEPTGEPSGSGSESTGEPTGEPTGEPSGSGSESTGEPTGEPSGSGSESAGGSSTPGYSVSTTTDTTTTTETTTTTTTTTWTVTKSDGSVETESGIVSGSDSSLTTITTFEPPSSSSGFGTESGLITDTNNESSAGSTGGASEPTGGASESTGGASEPTGEPTGGASESTGGASEPTGEPSGGASESTGGASEPTGEPTGGASESTGGASEPTGGASESTGGASEPTGNGSESTGEPTGEPTGGASESTGGASEPTGEPTGGASESTGGASEPTGEPTGGASESTGGASEPTGEPTGGASESTDGASEPTGEPTGGASESTGGASEPTGEPTGNGSETTGGSSTPGYSVS

SEQ ID NO: 2652 - protein, 211 aa, Candida parapsilosis
GDNGTGSGNTGDNGTGSGNTGDNGTGSGNTGDNGTGSGNTGDNGTGAGDNGTGAGDNGTGSGNTGDNGTGSGNTGDNGTGSGNTGDNGTGSGNTGDNGTGAGDNGTGAGDNGTGSGNTGDNGTGSGNTGDNGTGSGNTGDNGTGAGDNGTGAGDNGTGSGNTGDNGTGSGNTGDNGTGAGDNGTGSGNTGDNGTGAGDNGTGSGNTGDNGT

SEQ ID NO: 2653 - protein, 231 aa, Paenibacillus sp
GAQGPQGVQGVQGDQGPQGVQGAQGDQGPQGVQGVQGDQGPQGVQGVQGDQGPQGVQGVQGDQGPQGVQGVQGDQGPQGVQGAQGDQGPQGVQGVQGDQGPQGVQGVQGDQGPQGAQGVQGDQGPQGVQGPQGDQGPQGVQGVQGDQGPQGVQGVQGAQGPLGPQGIQGPLGAQGPLGPQGAEGPLGAQGPLGPQGAEGPLGAQGPLGPQGAEGPLGAQGPLGPQGAEGPL

SEQ ID NO: 2654 - protein, 334 aa, Xenopus tropicalis
GIGGIPGAVPGTGLGGVPGLTPGGGAVPGVVPGLVPGAGGVPGAGIPQLGVQPGAKASKYGLPGVGGVPGVGGVPGVGGVPGVGGVPGVGGVPGVGGVPGVGGVPGPTISGLGAKPPKIGGVGAGGFPAGVGVGGVPGAGAYPAGGKPPKPGYGAGAGLIPGGGITPGAGLGAGLVPGAGTGAGLYPGGKPPKPGYGLPGGALTPGAGLQPGAGLQPGAGLQPGAGLQPGAGLQPGAGLQPGAATGAGTYPGGKPPKPGLGIGGLTPGVAGLGPGAGLVPGAGGLAPGAAGGAYPGGKPPKPGAGLVPGAGGLAPGAGGLAPGAGGLVPGAGGL

SEQ ID NO: 2655 - protein, 292 aa, Xenopus tropicalis
GGIATGVAPGGAGGLYPGAGGKPPKPGYGPGAGFVPGAGIGAGAGAGLQPGGIGAGVAPGGVGAGGLYPGAGGKPPKPGYGPGAGWVPGAGVGLGTGVQPGGTGTGVAPGGIGAGGLYPGAGGKPPKPGYGLGAGLVPGAGVGPGAGLQPGGIGAGGVGAGGLYPGGKPPKPGYGPGAGYVPGAGYVPGAGVGPGAGLQPGGIGAGVAPGGVGAGGLYPGGKPPKPGYGPRAGLGTGAGIGAGLQPGGIGAGVAPGGVGAGGLYPGGKPPKPGYGPGAGFVPGVSNGAGQQP

SEQ ID NO: 2656 - protein, 252 aa, Anopheles darlingi
GGPGGAGGPGVDAHGRPTGGSGTGGPLVDAYGRPISGGHGGRPAGGSGTSGGPGVDAHGRPIGGSGTGGIDGQGRPSGGTAVDAYGRPIGGPGTGSPGSGGAGTGVPGVDGRGRPSGGPGVDAHGRPIGGTGAGGPGTTGTGTGGGVDAYGRPIGGQGTNGHDARGPPVDSHGRPIGGPGTGGLGSPIGTGIGGVDAYGRPSGPGGQGSGTPGGAPGHSGLGTGGHGVDAHGRPIGGPGTGVSGVDAHGRPI

SEQ ID NO: 2657 - protein, 243 aa, Anopheles darlingi
GVGQYPSGTGAGQYPSGTGAGQYPSGTGGTSGTGQYPGGTGAGQYPGGIGGTGGVGQYPGSTGTGQYPGGTGGTGGAGQYPSGTGAGQYPSGTGGTGGAGQYPGSTGVGQIPGGTGHYPSGTGAGQYPSGTGGTGGAGQYPGSTGAGQHPGGLGGTGGTGQYPSGTGAGQYPSGTGGTGGAGQYPGSGQYPSGTGGTGSAGQYPSGTGGAGQYPTGTGGAGGVGQYPSGTGAGQYPSGTGGIG

SEQ ID NO: 2658 - protein, 221 aa, Drosophila melanogaster
GIGGQTGAGQPGYGSQPGIGGQTGAGQPGYGSQPVVGAQTGTGQPGYGAQPGVGTQTGAGQPGYGSQPGIGGQTGARQPGYVTQPGVGAQTGIGQPGYGAQPGILGQTGAGQPGYGSQPGIGGQTGAGQPGYGTQPGVGAQTGTGQPGYGAQPGVGTQTGAGQPGYGSQPGIGGQTGAGQPGYGTQPGVGAQTGAGQPGYGAQPGVGAQTGAGQPGYGSQP

SEQ ID NO: 2659 - protein, 256 aa, Drosophila melanogaster
GIGGQTGGGQPGYGSQIGGQTGAGQPSYGSQPGVGAQNGAGQPGYGTQPVIGGQTGAGQPGYGGQTGVGGSPGFLTQPGIGGISGPIGGKLGGGQSEAAKPGYWAQPGIGGPSRYGSQPGIGDQTGTGQSGYGGQPGISGQTGGGQPGYGGQATISGLPGYGTQPGIGALTAVPGGHYGYETQPGIGGQTGTNQPGFGGQPGIGGQTGAGQPGYGFIGQPGIGGQTGTSGRQPGYGTQPGIGGQTAAGQPGYGSQT

SEQ ID NO: 2660 - protein, 252 aa, Synechococcus phage P60
GADGADGVDGVDGLGWTGGSYDPLTGVVTFTSDDGLGFVTGDLRGADGADGVDGVDGAVGPQGPEGPQGLQGDTGPQGPQGLQGEQGLQGPQGLPGADGADGAQGPQGIQGEQGLQGPQGLPGADGADSTVPGPQGPKGDKGDTGDAGPQGPKGDTGDAGPQGLKGDPGNDGADGATGPEGPQGPQGNPGADGADGAQGPKGDKGDTGDPGAQGPQGNPGDQGPQGNPGADGADGAIGPEGPQGPQGPEGPE

SEQ ID NO: 2661 - protein, 311 aa, Amblyomma variegatum
GPYGSSLGYSAFYGSRVGPFGTYGTSGLFGSGYGPFGHLGPYGSALGYSGLYGSRLGPFGTYGTSALYGSGYGPFGHLGPYGSTLGYSGLYGSRLGPFGTYGTSGVFGSGYGPFGHLGPYSSTLGYSGLYGSRLGPFGTYGTSALYGSGYGPFGHLGPYGSTLGYSGLYSSRLGPFGTYGTPGLFGSGYGPFGHLGPYGSTLGYSGLYGSGLGPFGTYGTSLFGSGYGPFGHLGPYGSSLGYSGLYGSSLGPFGPYGTSGLFGSVYGPFGHLGPYGSTLGYSGLYGSRLGPFGTYGTSSLYGSGYGPFGPL

SEQ ID NO: 2662 - protein, 218 aa, Kazachstania naganishii
GPSSGASGHSGPSSGASGHSGPSSGASGHSGPSSGASGHSGPSSGASGHSVTSSHTGPSSGASGHSGPSSGASGHSGPSSGASGHSGPSSGASGHSVTSSHTGPSSGASGHSGPSSGASGHSGPSSGASGHSGPSSGASGHSGPSSGASGHSGPSSGASGHSVTSSHTGPSSGASGHSGPSSGASGHSGPSSGASGHSGPSSGASGHSGPSSGASGHS

SEQ ID NO: 2663 - protein, 275 aa, Drosophila ananassae
GIGGGQPGIGVQPGYGGQTGGQPGYRGQTGTGTGQPGYGGQTGIGGGATQPSYAQTGGQPGYGGGQQVQPGYGGQTGAGQPGYGGQIGTGQPGYGGQTGIGGGQPSTGIQPGYGAQPGYGGQTGTGTGQPGYGGPAGTGPGLPGYGGQTGTGAGQPGFGGQTGAGQPGFGGQTGTGVGQPGYGGQAGTGQPGYGGQTGGQPGYGGQTGTGTGQPGYGGQTGIGGGQPGYGGQTGTGTGKPGYGEQTGTGAAQPSYGQTAGQPGYGGGLPGQLVQP

SEQ ID NO: 2664 - protein, 159 aa, Tetrapisispora blattae
GYTPSGKSSESSMNTASSESSMNTASSESWIKTASSESSMNTASSESSMNTASSESWINTASSESSMNTASSESWINTASSESSMNSASSESWINTASSESWMNTASSESWINTASSESSMNTASSESWINTASSESSMSTASSESWINTASSESSMST

SEQ ID NO: 2665 - protein, 282 aa, Tetrapisispora blattae
GTTTYRVSGSSSASSDVPPVYTTTVTSGSSTETDVVSEYSTTDSNGMPSTGTTTYHVSGSSSASSDVPPVYTTTVTSGSSTETDVVSEYSTTDSNGMPSTGTTTYHVSGSSSASSDVPPVYTTTVTSGSSTETDVVSEYSTTDSNGMPSTGTTTYEVTDSCPDCSTGAPSHRSNEVSSMPSSFATSSMSSISPATSSGMPPVYTTTVTSGSSTETDVVSEYSTTDSNGMPSTGTTTYHVSGSSSASSDVPPVYTTTVTSGSSTETDVVSEYSTTDSNGMPST

SEQ ID NO: 2666 - protein, 220 aa, Monodelphis domestica
GTYPPGQAPPGTYAPGQGPPGTYPPGQGPPGTYAPGQGPPGTYPPGQGPPGTYAPGQGPPGTYPPGQGPPGTYPPGQGPAGTYPPGQGPPGTYPPGQAPPGTYPPGQGPPGTYLPGQGPPGTYPPGQGPPGTYQPGEGAPGTYQPGPGAPGTYAPGQGPPGTYPPEQGPPGTYPPGQGPAGTYPPGQGPPGTYPPGQAPPGTYPPGQGPPGTYLPGQGPP

SEQ ID NO: 2667 - protein, 271 aa, Amblyomma variegatum
GLLGGYPGLGGLSSLYGGYPGLLGGLSGLGGPLGLGRYPGLSGLYGRYGTLGSLSSLYGGYPGYGGLSGLLGSYAGLGGLSTLYGGYPGLLGGLSGVGGPFGLGRYPGLSGLYGRYGTLGSLSTLYGGYPGYGGLSGLLGGYPGLGGLSGLYGGYPGVLGGLSGLGGRLGLLGRYPGLSGLYGGYGTLGSLSTLYGGYPGLTGVSSLYGGYSGALGGLSGLGGPLGVLGHYPGLYSSGLGSLGLLGPYGSSLGYSALYGSRVGPFGPYGTS

SEQ ID NO: 2668 - protein, 273 aa, Amblyomma variegatum
GLFGSVYGPIGHLGPYGSTLGYSGLYGSSLGPFGTYSTSGLFGSGYGPFGHLGPYGSTLGYSGLYGSRLGPFGTYGTSSLYGSGYGPFGHLGPYGSTLGYSGLYGSRLGPFGTYGTSGLFGSGYGPFGHLGPYGSTLGYSGVYGSRLGPFGTYGTSGLFGSSYGPFGHLGPYGSTLGYSGLYGSSLGPFGTYSTSGLFGSGYGPFGHLGPYGSTLGYSGLYGSRLGPFGTYGTSSLYGSGYGPFGPLGPYGSTLGYSGLYGSSVGPFGTYGTS

SEQ ID NO: 2669 - protein, 224 aa, Latrodectus hesperus
GQGSPGSGQPGSGHPGSGQPGSGSPGSGQPGSGSPGSGQPGSGSPGSGQPGSGSPGSGQPGYYQPGSQGQPGNGQPGSGQPGSGQPESGQPGNGQPGSGQPGSGEPGSGQPGYYRPGGKGQPGNGQPGSGQPGSGEPGSGQPGSGQPGYYRPGGKGQPGNGQPGSSQPGSGEPGSGQPGSGQPGYYRPGGKGQPGNGQPGSGQPGSGEPGSSQPGSGQPGYYRP

SEQ ID NO: 2670 - protein, 240 aa, Danaus plexippus
GQGMRPGQGMGPSQGMGPGQGMGPGQGIGPGQGMGPGQGVGPGQGIGPGQSVRPGQGMGPGQGMGPGQGVGPGQEMGPGQGIGPGQGMRPGQGVGPGQGMGHGQGMEPGQGMGPGQGLGPGQGVGPGQGIGSEQGMGPGQSMGPGQGMGPRQGMGPGKGFGSGQGIGPGQSMGPGQGMGPGQDVGPGQGIGSGQGIGPGQGIGRGQVLGPGQVIEPGQGLGPGQGIGPSQGMSPGQLMGP

SEQ ID NO: 2671 - protein, 204 aa, Encephalitozoon intestinalis
GEGEEGEDKDNTGEGEEGEDKDNTGEGEEGEDKDNTGEGEEGEDKDNTGEGEEGEDKDNTGEGEEGEDKDNTGEGEEGEDKDNTGEGEEGEDKDNTGEGEEGEDKDNTGEGEEGEDKDNTGEGEEGEDKDNTGEGEEGEDKDNTGEGEEGEDKDNTGEGEEGEDKDNTGEGEEGEDKDNTGEGEEGEDKDNTGEGEEGEDKDNT

SEQ ID NO: 2672 - protein, 189 aa, Encephalitozoon intestinalis
GEGEEGEEGEDKDNTGEGEEGEEGEDKDNTGEGEEGEEGEDKDNTGEGEEGEDKDNTGEGEEGEDKDNTGEGDEGEDKDNTGEGEEGEEGEDKDNTGEGEEGEDKDNTGEGEEGEEGEDKDNTGEGEEGEEGEDKDNTGEGEEGEEGEDKDNTGEGEEGEDKDNTGEGEEGEDKDNTGEGEEGEDKDNT

SEQ ID NO: 2673 - protein, 121 aa, Psychromonas ingrahamii
GQQKNSEQQKNNEQQKNSEQQKNNEQQKNSEQQKNSEQQKNNEQQKNNEQQKNNEQQKNNEQQKNNEQQKNNEQQKNNEQQKNNEQQKNSEQQKNNEQQKNSEQQKNNEQQKNNEQQKNNE

SEQ ID NO: 2674 - protein, 354 aa, Drosophila melanogaster
GLPPGSIPPLRPPNQGGHPPGSQKPPNVGIYPPSTGWIPPFGPLTQGGHPPGSLLPPNTGLPPGSIPPLGSPNQIGHPPGSQKPPNVGIYPPSTGWTPPSGPLTQGGHPPGSLLPPNTGLPPGSIPPLGSPNQIGHPPGSQKPPNVGIYPPSTGWIPPSGPLTQSGHPPGSLLPPNTGLPPGSIPPLRPPNQGGHPPGSQKPPNVGIYPPSTGWIPPSGPLTQGGHPPGSLLPPNTGLPSGSIPPLGSPNQIGHPPGSQKPPNSGIYPPSTGSIPPSGPLTQGGHPPGSLLPPNTGLPSGSIPPLGSPNQIGHPPGSQKPPNSGIYPPSTGWIPPSGPLTQGGHPPGSLLPPNT

SEQ ID NO: 2675 - protein, 198 aa, Chironomus tentans
GAQKWCDKTCKCKCEKEMPTGGCENNKKWCDETCDCVCPQKNTCIAPKVWDAKTCSCICVNPPKCNSPQVLKDTCCCGCQNVKSCKAPQKFIENICDCACPNKKQCKAPLVWSDEFCDCVCPNSASMKTCLSPKEWNKVTCTCDCNPPKPDCCPGTQKWMDDKCKCGCPNAQTDCAGGKKFNDFTCSCGCPSGKLDCT

SEQ ID NO: 2676 - protein, 275 aa, Acyrthosiphon pisum
GGGMHHQHQQHQQQQQHGKHHLLLHHHHTHDHQNSHNNGNHHDSDHDHVHHMHHHLQQHGGGDDDSSSSMLVGSLLQHHQHQQQQHQQQQHHHQQQHHHQQQHSPVDIYAAAAAAAHHNHQQQQQHQQQQQQHHSHHQQLQLQQHLKSSAAAAAAAAAAAEFAASNHPFSITRLLPPPPTASAAAAASASDKPSSAASVAAATASSATAASAAEKMYEMAAASQYGTTAGYNDYYHPHAHPHHPHHHGHPHPHHQQASLYHAAAAAAAAAAAAAA

SEQ ID NO: 2677 - protein, 203 aa, Megachile rotundata
GTTGGGGVTYPGGAPGTTTGGGTYPGGVHGTTTGGGGTYPGGVPGTTTGGGGGTYPGGVPGTTTGGGGTYPGGVPGTTTGGGGTYPGGGGTYPGGVPGTVTTGGGGTYPGGVPGTVTTGGGGTYPGGVPGTTGGGGTYPGGMPGTTTGGGVTYPGGTPGTRIDGGAVYPPGIPGTTTGGGGTYPGGIPGTTTGGGVTYPGGVP

SEQ ID NO: 2678 - protein, 172 aa, Megachile rotundata
GGGTYPGGVPGTTTGGGVIYPGGVPGTTTGGGTYPGGVPGTTTGGGVIYPGGVPGTTTGGGTYPGGVPGTTTGGGVIYPGGVPGTTTGGGTYPGGVPGTTITGDARVYVGTIPSGGVVGGEVYPGKVPGSGVVYPGGVPDRTTSGGVIYPGGVPGTTTGGGTYPGGAPGTTT

SEQ ID NO: 2679 - protein, 180 aa, Acyrthosiphon pisum
GQNSEQSNEGQNSEQSNEVQSSEHSNEGQNSKQSNEGQNSEQSNEVQSSEHSNEGQNSEQSNEVQSSEHSNEGQNSKQSNEGQNSKQSNEVQSSEHWNEGQNSKQSNEDQNSEQSNEGQNSKQSNEGQNSKQSNEDQNSEQSNEGQNSKQSNEVQSSEQSNEGQNSKQSNEGQSSEQSNE

SEQ ID NO: 2680 - protein, 240 aa, Pseudomonas syringae
GYGSTQTAREGSNLTAGYGSTGTAGSDSSLIAGYGSTQTSGEDSSLTAGYGSTQTAQEGSNLTAGYGSTGTAGSDSSLIAGYGSTQTSGGDSSLTAGYGSTQTAQEGSNLTAGYGSTGTAGSDSSLIAGYGSTQTSGEDSSLTAGYGSTQTAQEGSNLTAGYGSTGTAGSDSSLIAGYGSTQTSGGDSSLTAGYGSTQTAQEGSNLTSGYGSTGTAGADSSLIAGYGSTQTSGSDSALTA

SEQ ID NO: 2681 - protein, 204 aa, Nematostella vectensis
GSGRMADSGGMAGSGRMADSGRMAGSGHMAGSGHMAGSGHMAGSGRMAGSGRMADSGGMAGSWRMAGSGRMAGSGRMAGSGRMAGSWRMAGSGRMAGSGRMAGSGHMAGSGDMAGSGCMAGSGRMAGSGHMAGSGRMVGSGHMVGSGRMAGSGGMAGSGRMAGSWRMAGSGRMAGSGRMAGSGHMAGSGDMAGSGCMAGSGRMA

SEQ ID NO: 2682 - protein, 216 aa, Dasypus novemcinctus
GVPPSAGVPPSAGVPPSADVPPSAGVSPSAGIPPSAGAPPSAGVLPSAGVPPSAGAPLSAGVLPSAGVPPSAGVPPSAGAPPSAGVPPSAGVSPSAGIPPSAGAPPSAGVLPSAGVPLSAGVPPSAGIPPSAGAPPSAGVPPSAGAPPSAGVPPSAGVPPSASVPPSADVPPSAGVSPSAGIPPSAGIPPSAGIPPSAGAPPSAGAPPSAGVPPSA

SEQ ID NO: 2683 - protein, 295 aa, Trichoderma harzianum
GEVYNSAKKTCSCPDGQYWNGKQCVCPYGQVFNGKQCVPDCGKEATFDYNQKKCVCKNKGEIYDSKTKTCSCPDGQVWNGKQCVCPYGQVFNGKQCVPDCGKDATYDYNQKKCVCKNKGEVFDQKTKTCSCPDGQYWNGKQCACPYGQIFNGKQCVPDCGKDATYDYNQKKCVCKNKGEVFDQKTKTCSCPDGQYWNGKQCVCPYGKIFDGKQCVEDCGKDAHFDNNQKKCVCNKNGEIYDSKSKTCSCPDSQYWDGSKCACPYGTVWDGKHCNQDCGKDAHFDSNQKKCVCNKQ

SEQ ID NO: 2684 - protein, 240 aa, Nematostella vectensis
GLWLCKANTRLRRQNGHCPPGLWLCKANTRLRRQNGHCPPGLWLCKANTRLRRQNGHCPPGLWLCKANTRLRRQNGHCPPGLWLCKANTRLRRQNGHCPPGLWLCKANTRLRRQNGHCPPGLWLCKANTRLRRQNGHCPPGLWLCKANTRLRRQNGHCPPGLWLCKANTRLRRQNGHCPPGLWLCKANTRLRRQNGHCPPGLWLCKANTRLRRQNGHCPPGLWLCKANTRLRRQNGHCPP

SEQ ID NO: 2685 - protein, 210 aa, Nematostella vectensis
GPWRSVGGSLGPWRSVEGSLGPWRSVGGSLSPWRSAEGSLGPWRSVGGSLGPWRSVGGSLGPWRSVEGSLGPWRSVGGSLSPWRSAEGSLGPWRSVGGSLGPWRSVGGSLGPWRSVGGSLGPWRSAEGSLGPWRSVGGSLGPWRSVGGSLGPWRSVGGSLGPWRSVEGSLGPWRSVGGSLGPWRSVGGSLGPWRSAEGSLGPWRSVGGSL

SEQ ID NO: 2686 - protein, 192 aa, Caenorhabditis elegans
GEESDNGEESDNEEASDNGEASDNGEESDNEEASDNGEESDNGEERGNGEASDNGDESDNGEASDNGEESDNEEASDNGEESDNGEESDNGEERGNGEASDNGDESDNGEASDNGEESDNEEASDNGEESDNGEASDNGEESDNEEASDNGEESDNGEASDNGEESDNGEERDNGEASDNGEESENGEEIGL

SEQ ID NO: 2687 - protein, 165 aa, Leishmania mexicana
GPLSVDPQSVGPLSVGSQSVGPQSVDPQSVGPLSVDPQSVGPLSVDPQSVDPQSVGPLSVDPQSVGPLSVDPQSVGPLSVGPLSVDPQSVGPQSVGPQSVGPLSVDPQSVGPQSVDPQSVGPLSVDPQSVGPLSVGPLSVDPQSVGPQSVGPQSVGPLSVDPQSV

SEQ ID NO: 2688 - protein, 256 aa, Chelonia mydas
GSPQAQEGAPGRSSAQGSTQAREGAPGRSSARGSPQAQEGAPGRSSAQGSTQAREGAPGRSSARGSPQAQEGAPGRSSAQGSTQAREGAPGRSSARGSPQAQEGAPGRSSAQGSTQAREGAPGRSSARGSPQAQEGAPGRSSAQGSTQAREGAPGRSSARGSPQAQEGAPGRSSAQGSTQAREGAPGRSSARGSPQAQEGAPGRSSAQGSTQAREGAPGRSSARGSPQAQEGAPGRSSAQGSTQAREGAPGRSSAR

SEQ ID NO: 2689 - protein, 202 aa, Nasonia vitripennis
GGGGPGTQFPGGVVYQPGTQVGGGGPGTQPSGGVLYPPGTQVGGGGPGTQFPDGVVYQPGTQVGGGGPGAQLPGAVLYPPGTQVIGGGGPGTQTPGGVVYQPGIQAGGGGPGAQAPGIVYQPGTQVGGGPGAPGGIVYQPGTKTVGGGPGAQAPGVVYQPGTQVGGGPGAPGGIVYQPGTQTGGGGPGAQAPGLIYQPGTQA

SEQ ID NO: 2690 - protein, 285 aa, Euprymna scolopes
GMNRFMNRYRPMFNNMYSNMYRGRYRGMMEPMSRMTMDFQGRYMDSQGRMVDPRYYDYYGRFNDYDRYYGRSMFNYGWMMDGDRYNRYNRWMDYPERYMDMSGYQMDMSGRWMDMQGRHCNPYSQWMMYNYNRHGYYPNYSYGRHMFYPERWMDMSNYSMDMYGRYMDRWGRYCNPFSQYMNYYGRYWNYPGYNNYYYSRNMYYPERYFDMSNWQMDMQGRWMDNQGRYCSPYWNNWYGRHMYYPYQNNYFYGRYDYPGMDYSNYQMDMQGRYMDQYGMNDYYYS

SEQ ID NO: 2691 - DNA, 2842 bp, synthetic construct
  misc_feature 1..2842: note = Description of Artificial Sequence: Synthetic polynucleotide
  source 1..2842: mol_type = other DNA
ggcgcgcctaagcgatgactaggtctccaggtgagacggaaagtgaaacgtgatttcatgcgtcattttgaacattttgtaaatcttatttaataatgtgtgcggcaattcacatttaatttatgaatgttttcttaacatatcgcggcaactcaagaaacggcaggttcggatcttagctactagaccttaggaggtaaacatatgtcgtctggtgccaaattgtttgaaaatgaaatcccgtatgtcactgaactcgagggcgacgtcaatggtatgaagtttaccattcatggtaaaggtaccggcgatgcgagcgttggtaccattaaagcgcagttcatctgcactacgggcgacctgccggtcccgtgggcaaccctggtgagcaccctgagctacggtgttcagtgtttcgccaagtacccgccgcacatcaaggatttctacaagagctgcatgccggaaggttatgttcaagagcgtaccatcaccttcgaaggcgacggcgtgtttaagacgcgtgctgaggttacctttgaaaacggttctgtctacaatcgtgtcaaactgactggccagggttttaagaaagacggtcacattctgcgtaagaacgttgcattccaatgcccgccaagcattctgtatattctgcctgacaccgttaacaatggcatccgcgttgagttcaaccaggcgtacgatattgaaggtgtgaccgaaaaactggttaccaaatgcagccaaatgaatcgtccgttggcgggctccgcggcagtgcatatcccgcgttatcatcacctgagcaaacacaccaaactgagcaaagaccgcgacgagcgccgtgatcacatgtgtctggtagaggtcgtgaaagcggttgatctggacacgtatcagtaaggatctctccaaagcccgccgaaaggcgggcttttctgtcgtctcaaggtacgtcttcatcatcgctatcctgcaggcggatatcttcggaaaaaaaaaggcctgcgattaccagcaggcctgttgagatcgaggaaatctcgggatctagtcttgagctttgctcactcaaaggcggtaatgcggccgctagaaatattttatctgattaataagatgatcttcttgagatcgttttggtctgcgcgtaatctcttgctctgaaaacgaaaaaaccgccttgcagggcggtttttcgaaggttctctgagctaccaactctttgaaccgaggtaactggcttggaggagcgcagtcaccaaaacttgtcctttcagtttagccttaaccggcgcatgacttcaagactaactcctctaaatcaattaccagtggctgctgccagtggtgcttttgcatgtctttccgggttggactcaagacgatagttaccggataaggcgcagcggtcggactgaacggggggttcgtgcatacagtccagcttggagcgaactgcctacccggaactgagtgtcaggcgtggaatgagacaaacgcggccataacagcggaatgacaccggtaaaccgaaaggcaggaacaggagagcgcacgagggagccgccagggggaaacgcctggtatctttatagtcctgtcgggtttcgccaccactgatttgagcgtcagatttcgtgatgcttgtcaggggggcggagcctatggaaaaacggctttgccgcggccctctcacttccctgttaagtatcttcctggcatcttccaggaaatctccgccccgttcgtaagccatttccgctcgccgcagtcgaacgaccgagcgtagcgagtcagtgagcgaggaagcggaatatatcctgtatcacatattctgctgacgcaccggtgcagccttttttctcctgccacatgaagcacttcactgacaccctcatcagtgccaacatagtaagccagtatacactccgctagcgctgatgtccggcggtgcggtaccctggcagttccctactctcgcatggggtgaccccacactaccatcgggggccacaggcgcccacgaacccagttgacataagcctgttcggttcgtaaactgtaatgcaagtagcgtatgcgctcacgcaactggtccagaaccttgaccgaacgcagcggtggtaacggcgcagtggcggttttcatggcttgttatgactgtttttttgtacagtctatgcctcgggcatccaagcagcaagcgcgttacgccgtgggtcgatgtttgatgttatggagcagcaacgatgttacgcagcagggcagtcgccctaaaacaaagttaggtggctcaagtatgggcatcattcgcacatgtaggctcggccctgaccaagtcaaatccatgcgggctgctcttgatcttttcggtcgtgagttcggtgacgtagccacctactcccaacatcagccggactccgattacctcgggaacttgctccgtagtaagacattcattgcgcttgctgccttcgaccaagaagcggttgttggcgctctcgcggcttacgttctgcccaagtttgagcagccgcgtagtgagatatatatctatgatctcgcagtctccggagagcaccggaggcagggcattgccaccgcgctcatcaatctcctcaagcatgaggccaacgcgcttggtgcttatgtgatctacgtgcaagcagattacggtgacgatcccgcagtggctctctatacaaagttgggcatacgggaagaagtgatgcactttgatatcgacccaagtaccgccacctaacaattcgttcaagctcgaggtatcacgaggcagaatttcagataaaaaaaatccttagctttcgctaaggat

SEQ ID NO: 2692 - DNA, 3999 bp, synthetic construct
  misc_feature 1..3999: note = Description of Artificial Sequence: Synthetic polynucleotide
  source 1..3999: mol_type = other DNA
ggcgcgcctaagcgatgactaggtctccaggtgagacggaaagtgaaacgtgatttcatgcgtcattttgaacattttgtaaatcttatttaataatgtgtgcggcaattcacatttaatttatgaatgttttcttaacatatcgcggcaactcaagaaacggcaggttcggatcttagctactagaccttaggaggtaaacatatgtcgtctggtgccaaattgtttgaaaatgaaatcccgtatgtcactgaactcgagggcgacgtcaatggtatgaagtttaccattcatggtaaaggtaccggcgatgcgagcgttggtaccattaaagcgcagttcatctgcactacgggcgacctgccggtcccgtgggcaaccctggtgagcaccctgagctacggtgttcagtgtttcgccaagtacccgccgcacatcaaggatttctacaagagctgcatgccggaaggttatgttcaagagcgtaccatcaccttcgaaggcgacggcgtgtttaagacgcgtgctgaggttacctttgaaaacggttctgtctacaatcgtgtcaaactgactggccagggttttaagaaagacggtcacattctgcgtaagaacgttgcattccaatgcccgccaagcattctgtatattctgcctgacaccgttaacaatggcatccgcgttgagttcaaccaggcgtacgatattgaaggtgtgaccgaaaaactggttaccaaatgcagccaaatgaatcgtccgttggcgggctccgcggcagtgcatatcccgcgttatcatcacctgagcaaacacaccaaactgagcaaagaccgcgacgagcgccgtgatcacatgtgtctggtagaggtcgtgaaagcggttgatctggacacgtatcagtaaggatctctccaaagcccgccgaaaggcgggcttttctgtcgtctcaaggtacgtcttcatcatcgctatcctgcaggcggatatcttcggaaaaaaaaaggcctgcgattaccagcaggcctgttgagatcgaggaaatctcgggatctagtcttgagctttgctcactcaaaggcggtaatgcggccgctagaaatattttatctgattaataagatgatcttcttgagatcgttttggtctgcgcgtaatctcttgctctgaaaacgaaaaaaccgccttgcagggcggtttttcgaaggttctctgagctaccaactctttgaaccgaggtaactggcttggaggagcgcagtcaccaaaacttgtcctttcagtttagccttaaccggcgcatgacttcaagactaactcctctaaatcaattaccagtggctgctgccagtggtgcttttgcatgtctttccgggttggactcaagacgatagttaccggataaggcgcagcggtcggactgaacggggggttcgtgcatacagtccagcttggagcgaactgcctacccggaactgagtgtcaggcgtggaatgagacaaacgcggccataacagcggaatgacaccggtaaaccgaaaggcaggaacaggagagcgcacgagggagccgccagggggaaacgcctggtatctttatagtcctgtcgggtttcgccaccactgatttgagcgtcagatttcgtgatgcttgtcaggggggcggagcctatggaaaaacggctttgccgcggccctctcacttccctgttaagtatcttcctggcatcttccaggaaatctccgccccgttcgtaagccatttccgctcgccgcagtcgaacgaccgagcgtagcgagtcagtgagcgaggaagcggaatatatcctgtatcacatattctgctgacgcaccggtgcagccttttttctcctgccacatgaagcacttcactgacaccctcatcagtgccaacatagtaagccagtatacactccgctagcgctgatgtccggcggtgcggtaccctgatccttcaactcagcaaaagttcgatttattcaacaaagccacgttgtgtctcaaaatctctgatgttacattgcacaagataaaaatatatcatcatgaacaataaaactgtctgcttacataaacagtaatacaaggggtgttatgagccatattcaacgggaaacgtcttgctccaggccgcgattaaattccaacatggatgctgatttatatgggtataaatgggctcgcgataatgtcgggcaatcaggtgcgacaatctatcgattgtatgggaagcccgatgcgccagagttgtttctgaaacatggcaaaggtagcgttgccaatgatgttacagatgagatggtcagactaaactggctgacggaatttatgcctcttccgaccatcaagcattttatccgtactcctgatgatgcatggttactcaccactgcgatccccgggaaaacagcattccaggtattagaagaatatcctgattcaggtgaaaatattgttgatgcgctggcagtgttcctgcgccggttgcattcgattcctgtttgtaattgtccttttaacagcgatcgcgtatttcgcctcgctcaggcgcaatcacgaatgaataacggtttggttgatgcgagtgattttgatgacgagcgtaatggctggcctgttgaacaagtctggaaagaaatgcataagcttttgccattctcaccggattcagtcgtcactcatggtgatttctcacttgataaccttatttttgacgaggggaaattaataggttgtattgatgttggacgagtcggaatcgcagaccgataccaggatcttgccatcctatggaactgcctcggtgagttttctccttcattacagaaacggctttttcaaaaatatggtattgataatcctgatatgaataaattgcagtttcatttgatgctcgatgagtttttctaatcagaattggttaattggttgtaacactggcagagcattacgctgacttgacgggagctagttcatgaccaaaatcccttaacgtctagacttgaagactgacgtcgagacctacgaattcttgatcgggcacgtaagaggttccaactttcaccataatgaaataagatcactaccgggcgtattttttgagttatcgagattttcaggagctaaggaagctaaaatggagaaaaaaatcactggatataccaccgttgatatatcccaatggcatcgtaaagaacattttgaggcatttcagtcagttgctcaatgtacctataaccagaccgttcagctggatattacggcctttttaaagaccgtaaagaaaaataagcacaagttttatccggcctttattcacattcttgcccgcctgatgaatgctcatccggaatttcgtatggcaatgaaagacggtgagctggtgatatgggatagtgttcacccttgttacaccgttttccatgagcaaactgaaacgttttcatccctctggagtgaataccacgacgatttccggcagtttctacacatatattcgcaagatgtggcgtgttacggtgaaaacctggcctatttccctaaagggtttattgagaatatgtttttcgtgtcagccaatccctgggtgagtttcaccagttttgatttaaacgtggccaatatggacaacttcttcgcccccgttttcacgatgggcaaatattatacgcaaggcgacaaggtgctgatgccgctggcgattcaggttcatcatgccgtttgtgatggcttccatgtcggcagaatgcttaatgaattacaacagtactgtgatgagtggcagggcggggcgtaatttgatatcgagctcgcttggactcctgttgatagatccagtaatgacctcagaactccatctggatttgttcagaacgctcggttgccgccgggcgttttttattggtgagaatccaagcctcctcgaggtatcacgaggcagaatttcagataaaaaaaatccttagctttcgctaaggat

SEQ ID NO: 2693 - DNA, 4026 bp, synthetic construct
  misc_feature 1..4026: note = Description of Artificial Sequence: Synthetic polynucleotide
  source 1..4026: mol_type = other DNA
ggcgcgcctaagcgatgactaggtctccaggtgagacggaaagtgaaacgtgatttcatgcgtcattttgaacattttgtaaatcttatttaataatgtgtgcggcaattcacatttaatttatgaatgttttcttaacatatcgcggcaactcaagaaacggcaggttcggatcttagctactagaccttaggaggtaaacatatgtcgtctggtgccaaattgtttgaaaatgaaatcccgtatgtcactgaactcgagggcgacgtcaatggtatgaagtttaccattcatggtaaaggtaccggcgatgcgagcgttggtaccattaaagcgcagttcatctgcactacgggcgacctgccggtcccgtgggcaaccctggtgagcaccctgagctacggtgttcagtgtttcgccaagtacccgccgcacatcaaggatttctacaagagctgcatgccggaaggttatgttcaagagcgtaccatcaccttcgaaggcgacggcgtgtttaagacgcgtgctgaggttacctttgaaaacggttctgtctacaatcgtgtcaaactgactggccagggttttaagaaagacggtcacattctgcgtaagaacgttgcattccaatgcccgccaagcattctgtatattctgcctgacaccgttaacaatggcatccgcgttgagttcaaccaggcgtacgatattgaaggtgtgaccgaaaaactggttaccaaatgcagccaaatgaatcgtccgttggcgggctccgcggcagtgcatatcccgcgttatcatcacctgagcaaacacaccaaactgagcaaagaccgcgacgagcgccgtgatcacatgtgtctggtagaggtcgtgaaagcggttgatctggacacgtatcagtaaggatctctccaaagcccgccgaaaggcgggcttttctgtcgtctcaaggtacgtcttcatcatcgctatcctgcaggcggatatcttcggaaaaaaaaaggcctgcgattaccagcaggcctgttgagatcgaggaaatctcgggatctagtcttgagctttgctcactcaaaggcggtaatgcggccgctagaaatattttatctgattaataagatgatcttcttgagatcgttttggtctgcgcgtaatctcttgctctgaaaacgaaaaaaccgccttgcagggcggtttttcgaaggttctctgagctaccaactctttgaaccgaggtaactggcttggaggagcgcagtcaccaaaacttgtcctttcagtttagccttaaccggcgcatgacttcaagactaactcctctaaatcaattaccagtggctgctgccagtggtgcttttgcatgtctttccgggttggactcaagacgatagttaccggataaggcgcagcggtcggactgaacggggggttcgtgcatacagtccagcttggagcgaactgcctacccggaactgagtgtcaggcgtggaatgagacaaacgcggccataacagcggaatgacaccggtaaaccgaaaggcaggaacaggagagcgcacgagggagccgccagggggaaacgcctggtatctttatagtcctgtcgggtttcgccaccactgatttgagcgtcagatttcgtgatgcttgtcaggggggcggagcctatggaaaaacggctttgccgcggccctctcacttccctgttaagtatcttcctggcatcttccaggaaatctccgccccgttcgtaagccatttccgctcgccgcagtcgaacgaccgagcgtagcgagtcagtgagcgaggaagcggaatatatcctgtatcacatattctgctgacgcaccggtgcagccttttttctcctgccacatgaagcacttcactgacaccctcatcagtgccaacatagtaagccagtatacactccgctagcgctgatgtccggcggtgcggtaccaggtggcacttttcggggaaatgtgcgcggaacccctatttgtttatttttctaaatacattcaaatatgtatccgctcatgagacaataaccctgataaatgcttcaataatattgaaaaaggaagagtatgagtattcaacatttccgtgtcgcccttattcccttttttgcggcattttgccttcctgtttttgctcacccagaaacgctggtgaaagtaaaagatgctgaagatcagttgggtgcacgagtgggttacatcgaactggatctcaacagcggtaagatccttgagagttttcgccccgaagaacgttttccaatgatgagcacttttaaagttctgctatgtggcgcggtattatcccgtattgacgccgggcaagagcaactcggtcgccgcatacactattctcagaatgacttggttgagtactcaccagtcacagaaaagcatcttacggatggcatgacagtaagagaattatgcagtgctgccataaccatgagtgataacactgcggccaacttacttctgacaacgatcggaggaccgaaggagctaaccgcttttttgcacaacatgggggatcatgtaactcgccttgatcgttgggaaccggagctgaatgaagccataccaaacgacgagcgtgacaccacgatgcctgtagcaatggcaacaacgttgcgcaaactattaactggcgaactacttactctagcttcccggcaacaattaatagactggatggaggcggataaagttgcaggaccacttctgcgctcggcccttccggctggctggtttattgctgataaatctggagccggtgagcgtgggtcgcgcggtatcattgcagcactggggccagatggtaagccctcccgtatcgtagttatctacacgacggggagtcaggcaactatggatgaacgaaatagacagatcgctgagataggtgcctcactgattaagcattggtaactgtcagaccaagtttactcatatatactttagattgatttaaaacttcatttttaatttaaaaggatctaggtgaagatcctttctagacttgaagactgacgtcgagacctacgaattcttgatcgggcacgtaagaggttccaactttcaccataatgaaataagatcactaccgggcgtattttttgagttatcgagattttcaggagctaaggaagctaaaatggagaaaaaaatcactggatataccaccgttgatatatcccaatggcatcgtaaagaacattttgaggcatttcagtcagttgctcaatgtacctataaccagaccgttcagctggatattacggcctttttaaagaccgtaaagaaaaataagcacaagttttatccggcctttattcacattcttgcccgcctgatgaatgctcatccggaatttcgtatggcaatgaaagacggtgagctggtgatatgggatagtgttcacccttgttacaccgttttccatgagcaaactgaaacgttttcatccctctggagtgaataccacgacgatttccggcagtttctacacatatattcgcaagatgtggcgtgttacggtgaaaacctggcctatttccctaaagggtttattgagaatatgtttttcgtgtcagccaatccctgggtgagtttcaccagttttgatttaaacgtggccaatatggacaacttcttcgcccccgttttcacgatgggcaaatattatacgcaaggcgacaaggtgctgatgccgctggcgattcaggttcatcatgccgtttgtgatggcttccatgtcggcagaatgcttaatgaattacaacagtactgtgatgagtggcagggcggggcgtaatttgatatcgagctcgcttggactcctgttgatagatccagtaatgacctcagaactccatctggatttgttcagaacgctcggttgccgccgggcgttttttattggtgagaatccaagcctcctcgaggtatcacgaggcagaatttcagataaaaaaaatccttagctttcgctaaggat

SEQ ID NO: 2694 - DNA, 4185 bp, synthetic construct
  misc_feature 1..4185: note = Description of Artificial Sequence: Synthetic polynucleotide
  source 1..4185: mol_type = other DNA
ggcgcgcctaagcgatgactaggtctccaggtgagacggaaagtgaaacgtgatttcatgcgtcattttgaacattttgtaaatcttatttaataatgtgtgcggcaattcacatttaatttatgaatgttttcttaacatatcgcggcaactcaagaaacggcaggttcggatcttagctactagaccttaggaggtaaacatatgtcgtctggtgccaaattgtttgaaaatgaaatcccgtatgtcactgaactcgagggcgacgtcaatggtatgaagtttaccattcatggtaaaggtaccggcgatgcgagcgttggtaccattaaagcgcagttcatctgcactacgggcgacctgccggtcccgtgggcaaccctggtgagcaccctgagctacggtgttcagtgtttcgccaagtacccgccgcacatcaaggatttctacaagagctgcatgccggaaggttatgttcaagagcgtaccatcaccttcgaaggcgacggcgtgtttaagacgcgtgctgaggttacctttgaaaacggttctgtctacaatcgtgtcaaactgactggccagggttttaagaaagacggtcacattctgcgtaagaacgttgcattccaatgcccgccaagcattctgtatattctgcctgacaccgttaacaatggcatccgcgttgagttcaaccaggcgtacgatattgaaggtgtgaccgaaaaactggttaccaaatgcagccaaatgaatcgtccgttggcgggctccgcggcagtgcatatcccgcgttatcatcacctgagcaaacacaccaaactgagcaaagaccgcgacgagcgccgtgatcacatgtgtctggtagaggtcgtgaaagcggttgatctggacacgtatcagtaaggatctctccaaagcccgccgaaaggcgggcttttctgtcgtctcaaggtacgtcttcatcatcgctatcctgcaggcggatatcttcggaaaaaaaaaggcctgcgattaccagcaggcctgttgagatcgaggaaatctcgggatctagtcttgagctttgctcactcaaaggcggtaatgcggccgctagaaatattttatctgattaataagatgatcttcttgagatcgttttggtctgcgcgtaatctcttgctctgaaaacgaaaaaaccgccttgcagggcggtttttcgaaggttctctgagctaccaactctttgaaccgaggtaactggcttggaggagcgcagtcaccaaaacttgtcctttcagtttagccttaaccggcgcatgacttcaagactaactcctctaaatcaattaccagtggctgctgccagtggtgcttttgcatgtctttccgggttggactcaagacgatagttaccggataaggcgcagcggtcggactgaacggggggttcgtgcatacagtccagcttggagcgaactgcctacccggaactgagtgtcaggcgtggaatgagacaaacgcggccataacagcggaatgacaccggtaaaccgaaaggcaggaacaggagagcgcacgagggagccgccagggggaaacgcctggtatctttatagtcctgtcgggtttcgccaccactgatttgagcgtcagatttcgtgatgcttgtcaggggggcggagcctatggaaaaacggctttgccgcggccctctcacttccctgttaagtatcttcctggcatcttccaggaaatctccgccccgttcgtaagccatttccgctcgccgcagtcgaacgaccgagcgtagcgagtcagtgagcgaggaagcggaatatatcctgtatcacatattctgctgacgcaccggtgcagccttttttctcctgccacatgaagcacttcactgacaccctcatcagtgccaacatagtaagccagtatacactccgctagcgctgatgtccggcggtgcggtaccaggtggcacttttcggggaaatgtgcgcggaacccctatttgtttatttttctaaatacattcaaatatgtatccgctcatgagacaataaccctgataaatgcttcaataatattgaaaaaggaagagtatgagtattcaacatttccgtgtcgcccttattcccttttttgcggcattttgccttcctgtttttgctcacccagaaacgctggtgaaagtaaaagatgctgaagatcagttgggtgcacgagtgggttacatcgaactggatctcaacagcggtaagatccttgagagttttcgccccgaagaacgttttccaatgatgagcacttttaaagttctgctatgtggcgcggtattatcccgtattgacgccgggcaagagcaactcggtcgccgcatacactattctcagaatgacttggttgagtactcaccagtcacagaaaagcatcttacggatggcatgacagtaagagaattatgcagtgctgccataaccatgagtgataacactgcggccaacttacttctgacaacgatcggaggaccgaaggagctaaccgcttttttgcacaacatgggggatcatgtaactcgccttgatcgttgggaaccggagctgaatgaagccataccaaacgacgagcgtgacaccacgatgcctgtagcaatggcaacaacgttgcgcaaactattaactggcgaactacttactctagcttcccggcaacaattaatagactggatggaggcggataaagttgcaggaccacttctgcgctcggcccttccggctggctggtttattgctgataaatctggagccggtgagcgtgggtcgcgcggtatcattgcagcactggggccagatggtaagccctcccgtatcgtagttatctacacgacggggagtcaggcaactatggatgaacgaaatagacagatcgctgagataggtgcctcactgattaagcattggtaactgtcagaccaagtttactcatatatactttagattgatttaaaacttcatttttaatttaaaaggatctaggtgaagatcctttctagacttgaagactgacgtcgagacctacgaattcctgatccttcaactcagcaaaagttcgatttattcaacaaagccacgttgtgtctcaaaatctctgatgttacattgcacaagataaaaatatatcatcatgaacaataaaactgtctgcttacataaacagtaatacaaggggtgttatgagccatattcaacgggaaacgtcttgctccaggccgcgattaaattccaacatggatgctgatttatatgggtataaatgggctcgcgataatgtcgggcaatcaggtgcgacaatctatcgattgtatgggaagcccgatgcgccagagttgtttctgaaacatggcaaaggtagcgttgccaatgatgttacagatgagatggtcagactaaactggctgacggaatttatgcctcttccgaccatcaagcattttatccgtactcctgatgatgcatggttactcaccactgcgatccccgggaaaacagcattccaggtattagaagaatatcctgattcaggtgaaaatattgttgatgcgctggcagtgttcctgcgccggttgcattcgattcctgtttgtaattgtccttttaacagcgatcgcgtatttcgcctcgctcaggcgcaatcacgaatgaataacggtttggttgatgcgagtgattttgatgacgagcgtaatggctggcctgttgaacaagtctggaaagaaatgcataagcttttgccattctcaccggattcagtcgtcactcatggtgatttctcacttgataaccttatttttgacgaggggaaattaataggttgtattgatgttggacgagtcggaatcgcagaccgataccaggatcttgccatcctatggaactgcctcggtgagttttctccttcattacagaaacggctttttcaaaaatatggtattgataatcctgatatgaataaattgcagtttcatttgatgctcgatgagtttttctaatcagaattggttaattggttgtaacactggcagagcattacgctgacttgacgggagctagttcatgaccaaaatcccttaacgctcgaggtatcacgaggcagaatttcagataaaaaaaatccttagctttcgctaaggat

SEQ ID NO: 2695 - DNA, 4185 bp, synthetic construct
  misc_feature 1..4185: note = Description of Artificial Sequence: Synthetic polynucleotide
  source 1..4185: mol_type = other DNA
ggcgcgcctaagcgatgactaggtctccaggtgagacggaaagtgaaacgtgatttcatgcgtcattttgaacattttgtaaatcttatttaataatgtgtgcggcaattcacatttaatttatgaatgttttcttaacatatcgcggcaactcaagaaacggcaggttcggatcttagctactagaccttaggaggtaaacatatgtcgtctggtgccaaattgtttgaaaatgaaatcccgtatgtcactgaactcgagggcgacgtcaatggtatgaagtttaccattcatggtaaaggtaccggcgatgcgagcgttggtaccattaaagcgcagttcatctgcactacgggcgacctgccggtcccgtgggcaaccctggtgagcaccctgagctacggtgttcagtgtttcgccaagtacccgccgcacatcaaggatttctacaagagctgcatgccggaaggttatgttcaagagcgtaccatcaccttcgaaggcgacggcgtgtttaagacgcgtgctgaggttacctttgaaaacggttctgtctacaatcgtgtcaaactgactggccagggttttaagaaagacggtcacattctgcgtaagaacgttgcattccaatgcccgccaagcattctgtatattctgcctgacaccgttaacaatggcatccgcgttgagttcaaccaggcgtacgatattgaaggtgtgaccgaaaaactggttaccaaatgcagccaaatgaatcgtccgttggcgggctccgcggcagtgcatatcccgcgttatcatcacctgagcaaacacaccaaactgagcaaagaccgcgacgagcgccgtgatcacatgtgtctggtagaggtcgtgaaagcggttgatctggacacgtatcagtaaggatctctccaaagcccgccgaaaggcgggcttttctgtcgtctcaaggtacgtcttcatcatcgctatcctgcaggcggatatcttcggaaaaaaaaaggcctgcgattaccagcaggcctgttgagatcgaggaaatctcgggatctagtcttgagctttgctcactcaaaggcggtaatgcggccgctagaaatattttatctgattaataagatgatcttcttgagatcgttttggtctgcgcgtaatctcttgctctgaaaacgaaaaaaccgccttgcagggcggtttttcgaaggttctctgagctaccaactctttgaaccgaggtaactggcttggaggagcgcagtcaccaaaacttgtcctttcagtttagccttaaccggcgcatgacttcaagactaactcctctaaatcaattaccagtggctgctgccagtggtgcttttgcatgtctttccgggttggactcaagacgatagttaccggataaggcgcagcggtcggactgaacggggggttcgtgcatacagtccagcttggagcgaactgcctacccggaactgagtgtcaggcgtggaatgagacaaacgcggccataacagcggaatgacaccggtaaaccgaaaggcaggaacaggagagcgcacgagggagccgccagggggaaacgcctggtatctttatagtcctgtcgggtttcgccaccactgatttgagcgtcagatttcgtgatgcttgtcaggggggcggagcctatggaaaaacggctttgccgcggccctctcacttccctgttaagtatcttcctggcatcttccaggaaatctccgccccgttcgtaagccatttccgctcgccgcagtcgaacgaccgagcgtagcgagtcagtgagcgaggaagcggaatatatcctgtatcacatattctgctgacgcaccggtgcagccttttttctcctgccacatgaagcacttcactgacaccctcatcagtgccaacatagtaagccagtatacactccgctagcgctgatgtccggcggtgcggtaccctgatccttcaactcagcaaaagttcgatttattcaacaaagccacgttgtgtctcaaaatctctgatgttacattgcacaagataaaaatatatcatcatgaacaataaaactgtctgcttacataaacagtaatacaaggggtgttatgagccatattcaacgggaaacgtcttgctccaggccgcgattaaattccaacatggatgctgatttatatgggtataaatgggctcgcgataatgtcgggcaatcaggtgcgacaatctatcgattgtatgggaagcccgatgcgccagagttgtttctgaaacatggcaaaggtagcgttgccaatgatgttacagatgagatggtcagactaaactggctgacggaatttatgcctcttccgaccatcaagcattttatccgtactcctgatgatgcatggttactcaccactgcgatccccgggaaaacagcattccaggtattagaagaatatcctgattcaggtgaaaatattgttgatgcgctggcagtgttcctgcgccggttgcattcgattcctgtttgtaattgtccttttaacagcgatcgcgtatttcgcctcgctcaggcgcaatcacgaatgaataacggtttggttgatgcgagtgattttgatgacgagcgtaatggctggcctgttgaacaagtctggaaagaaatgcataagcttttgccattctcaccggattcagtcgtcactcatggtgatttctcacttgataaccttatttttgacgaggggaaattaataggttgtattgatgttggacgagtcggaatcgcagaccgataccaggatcttgccatcctatggaactgcctcggtgagttttctccttcattacagaaacggctttttcaaaaatatggtattgataatcctgatatgaataaattgcagtttcatttgatgctcgatgagtttttctaatcagaattggttaattggttgtaacactggcagagcattacgctgacttgacgggagctagttcatgaccaaaatcccttaacgtctagacttgaagactgacgtcgagacctacgaattcaggtggcacttttcggggaaatgtgcgcggaacccctatttgtttatttttctaaatacattcaaatatgtatccgctcatgagacaataaccctgataaatgcttcaataatattgaaaaaggaagagtatgagtattcaacatttccgtgtcgcccttattcccttttttgcggcattttgccttcctgtttttgctcacccagaaacgctggtgaaagtaaaagatgctgaagatcagttgggtgcacgagtgggttacatcgaactggatctcaacagcggtaagatccttgagagttttcgccccgaagaacgttttccaatgatgagcacttttaaagttctgctatgtggcgcggtattatcccgtattgacgccgggcaagagcaactcggtcgccgcatacactattctcagaatgacttggttgagtactcaccagtcacagaaaagcatcttacggatggcatgacagtaagagaattatgcagtgctgccataaccatgagtgataacactgcggccaacttacttctgacaacgatcggaggaccgaaggagctaaccgcttttttgcacaacatgggggatcatgtaactcgccttgatcgttgggaaccggagctgaatgaagccataccaaacgacgagcgtgacaccacgatgcctgtagcaatggcaacaacgttgcgcaaactattaactggcgaactacttactctagcttcccggcaacaattaatagactggatggaggcggataaagttgcaggaccacttctgcgctcggcccttccggctggctggtttattgctgataaatctggagccggtgagcgtgggtcgcgcggtatcattgcagcactggggccagatggtaagccctcccgtatcgtagttatctacacgacggggagtcaggcaactatggatgaacgaaatagacagatcgctgagataggtgcctcactgattaagcattggtaactgtcagaccaagtttactcatatatactttagattgatttaaaacttcatttttaatttaaaaggatctaggtgaagatccttctcgaggtatcacgaggcagaatttcagataaaaaaaatccttagctttcgctaaggat

SEQ ID NO: 2696 - DNA, 2801 bp, synthetic construct
  misc_feature 1..2801: note = Description of Artificial Sequence: Synthetic polynucleotide
  source 1..2801: mol_type = other DNA
ggcgcgcctaagcgatggtctcaaggagagacgtgaaagtgaaacgtgatttcatgcgtcattttgaacattttgtaaatcttatttaataatgtgtgcggcaattcacatttaatttatgaatgttttcttaacatatcgcggcaactcaagaaacggcaggttcggatcttagctactagagattaaggaggtaaaaaaaatgagtgtgatcgctaaacaaatgacctacaaggtttatatgtcaggcacggtcaatggacactactttgaggtcgaaggtgatggaaaaggtaagccctacgagggggagcagacggtaaagctcactgtcaccaagggcggacctctgccatttgcttgggatattttatcaccacagtgtcagtacggaagcataccattcaccaagtaccctgaagatatccctgactatgtaaagcagtcattcccggagggctatacatgggagaggatcatgaactttgaagatggtgcagtgtgtactgtcagcaatgattccagcatccaaggcaactgtttcatctaccatgtcaagttctctggtttgaactttcctcccaatggacctgtcatgcagaagaaaacacagggctgggaacccaacactgagcgtctgtttgcacgagatggaatgctgctaggaaacaactttatggctctgaagttagaaggaggcggtcactatttgtgtgaatttaaaactacttacaaggcaaagaagcctgtgaagatgccagggtatcactatgttgaccgcaaactggatgtaaccaatcacaacaaggattacacttcggttgagcagtgtgaaatttccattgcacgcaaacctgtggtcgcctaaggatctctccaaagcccgccgaaaggcgggcttttctgtcgtctcaaggtacgtcttcatcgctatcctgcaggcggatatcttcggaaaaaaaaaggcctgcgattaccagcaggcctgttgagatcgaggaaatctcgggatctagtcttgagctttgctcactcaaaggcggtaatgcggccgctagaaatattttatctgattaataagatgatcttcttgagatcgttttggtctgcgcgtaatctcttgctctgaaaacgaaaaaaccgccttgcagggcggtttttcgaaggttctctgagctaccaactctttgaaccgaggtaactggcttggaggagcgcagtcaccaaaacttgtcctttcagtttagccttaaccggcgcatgacttcaagactaactcctctaaatcaattaccagtggctgctgccagtggtgcttttgcatgtctttccgggttggactcaagacgatagttaccggataaggcgcagcggtcggactgaacggggggttcgtgcatacagtccagcttggagcgaactgcctacccggaactgagtgtcaggcgtggaatgagacaaacgcggccataacagcggaatgacaccggtaaaccgaaaggcaggaacaggagagcgcacgagggagccgccagggggaaacgcctggtatctttatagtcctgtcgggtttcgccaccactgatttgagcgtcagatttcgtgatgcttgtcaggggggcggagcctatggaaaaacggctttgccgcggccctctcacttccctgttaagtatcttcctggcatcttccaggaaatctccgccccgttcgtaagccatttccgctcgccgcagtcgaacgaccgagcgtagcgagtcagtgagcgaggaagcggaatatatcctgtatcacatattctgctgacgcaccggtgcagccttttttctcctgccacatgaagcacttcactgacaccctcatcagtgccaacatagtaagccagtatacactccgctagcgctgatgtccggcggtgcggtaccctggcagttccctactctcgcatggggtgaccccacactaccatcgggggccacaggcgcccacgaacccagttgacataagcctgttcggttcgtaaactgtaatgcaagtagcgtatgcgctcacgcaactggtccagaaccttgaccgaacgcagcggtggtaacggcgcagtggcggttttcatggcttgttatgactgtttttttgtacagtctatgcctcgggcatccaagcagcaagcgcgttacgccgtgggtcgatgtttgatgttatggagcagcaacgatgttacgcagcagggcagtcgccctaaaacaaagttaggtggctcaagtatgggcatcattcgcacatgtaggctcggccctgaccaagtcaaatccatgcgggctgctcttgatcttttcggtcgtgagttcggtgacgtagccacctactcccaacatcagccggactccgattacctcgggaacttgctccgtagtaagacattcattgcgcttgctgccttcgaccaagaagcggttgttggcgctctcgcggcttacgttctgcccaagtttgagcagccgcgtagtgagatatatatctatgatctcgcagtctccggagagcaccggaggcagggcattgccaccgcgctcatcaatctcctcaagcatgaggccaacgcgcttggtgcttatgtgatctacgtgcaagcagattacggtgacgatcccgcagtggctctctatacaaagttgggcatacgggaagaagtgatgcactttgatatcgacccaagtaccgccacctaacaattcgttcaagctcgaggtatcacgaggcagaatttcagataaaaaaaatccttagctttcgctaaggat

SEQ ID NO: 2697 - DNA, 6574 bp, synthetic construct
  misc_feature 1..6574: note = Description of Artificial Sequence: Synthetic polynucleotide
  source 1..6574: mol_type = other DNA
gcgatcgcggtctcactatccagaaaacggaacagattatggaattagtcaaaccaattgtcgacaatgttcgtcaaaatggtgacaaagcccttttagaactaactgccaagtttgatggagtcgctttgaagacacctgtgttagaagctcctttcccagaggaacttatgcaattgccagataacgttaagagagccattgatctctctatagataacgtcaggaaattccatgaagctcaactaacggagacgttgcaagttgagacttgccctggtgtagtctgctctcgttttgcaagacctattgagaaagttggcctctatattcctggtggaaccgcaattctgccttccacttccctgatgctgggtgttcctgccaaagttgctggttgcaaagaaattgtttttgcatctccacctaagaaggatggtacccttaccccagaagtcatctacgttgcccacaaggttggtgctaagtgtatcgtgctagcaggaggcgcccaggcagtagctgctatggcttacggaacagaaactgttcctaagtgtgacaaaatatttggtccaggaaaccagttcgttactgctgccaagatgatggttcaaaatgacacatcagccctgtgtagtattgacatgcctgctgggccttctgaagttctagttattgctgataaatacgctgatccagatttcgttgcctcagaccttctgtctcaagctgaacatggtattgattcccaggtgattctgttggctgtcgatatgacagacaaggagcttgccagaattgaagatgctgttcacaaccaagctgtgcagttgccaagggttgaaattgtacgcaagtgtattgcacactctacaaccctatcggttgcaacctacgagcaggctttggaaatgtccaatcagtacgctcctgaacacttgatcctgcaaatcgagaatgcttcttcttatgttgatcaagtacaacacgctggatctgtgtttgttggtgcctactctccagagagttgtggagattactcctccggtaccaaccacactttgccaacgtacggatatgcccgtcaatacagcggagttaacactgcaaccttccagaagttcatcacttcacaagacgtaactcctgagggactgaaacatattggccaagcagtgatggatctggctgctgttgaaggtctagatgctcaccgcaatgctgttaaggttcgtatggagaaactgggacttatttaattatttagagattttaacttacatttagattcgatagatctaaccggcatctaacatccagtgtttctaatctagtgaatcgagatcaagtctcactctgaacataataaataaggtctaaccccatggaattacatgtccccttgggttctgagattgtcttacccggtggggaaagagccatactcaagttcgtaggaaatgtggagtcaaagtctgggatttttgctggtgttgaactgattggtcaaatgagtggaaaaggaaacctcagcttttttgtagaaatgtcttggtgtcctcgtccaatcaggtagccatctctgaaatatctggctccgttgcaactccgaacgacctgctggcaacgtaaaattctccggggtaaaacttaaatgtggagtaatggaaccagaaacgtctcttcccttctctctccttccaccgcccgttaccgtccctaggaaattttactctgctggagagcttcttctacggcccccttgcagcaatgctcttcccagcattacgttgcgggtaaaacggaggtcgtgtacccgacctagcagcccagggatggaaaagtcccggccgtcgctggcaataatagcgggcggacgcatgtcatgagattattggaaaccaccagaatcgaatataaaaggcgaacacctttcccaattttggtttctcctgacccaaagactttaaatttaatttatttgtccctatttcaatcaattgaacaactatcaggcgcgccgaaacgatgagatttccttcaatttttactgctgttttattcgcagcatcctccgcattagctgctccagtcaacactacaacagaagatgaaacggcacaaattccggctgaagctgtcatcggttactcagatttagaaggggatttcgatgttgctgttttgccattttccaacagcacaaataacgggttattgtttataaatactactattgccagcattgctgctaaagaagaaggggtatctctcgagaaaagagaggctgaagcaaggtatcgctcatcgcgaaagtgaaacgtgatttcatgcgtcattttgaacattttgtaaatcttatttaataatgtgtgcggcaattcacatttaatttatgaatgttttcttaacatatcgcggcaactcaagaaacggcaggttcggatcttagctactagagattaaggaggtaaaaaaaatgagtgtgatcgctaaacaaatgacctacaaggtttatatgtcaggcacggtcaatggacactactttgaggtcgaaggtgatggaaaaggtaagccctacgagggggagcagacggtaaagctcactgtcaccaagggcggacctctgccatttgcttgggatattttatcaccacagtgtcagtacggaagcataccattcaccaagtaccctgaagatatccctgactatgtaaagcagtcattcccggagggctatacatgggagaggatcatgaactttgaagatggtgcagtgtgtactgtcagcaatgattccagcatccaaggcaactgtttcatctaccatgtcaagttctctggtttgaactttcctcccaatggacctgtcatgcagaagaaaacacagggctgggaacccaacactgagcgtctctttgcacgagatggaatgctgctaggaaacaactttatggctctgaagttagaaggaggcggtcactatttgtgtgaatttaaaactacttacaaggcaaagaagcctgtgaagatgccagggtatcactatgttgaccgcaaactggatgtaaccaatcacaacaaggattacacttcggttgagcagtgtgaaatttccattgcacgcaaacctgtggtcgcctaaggatctctccaaagcccgccgaaaggcgggcttttctgtgcgatgttgctgacagaggtgactacaaagatgacgacgataaagattacaaagacgatgacgataaggactataaagatgatgacgacaaataataacctgcaggagacatgactgttcctcagttcaagttgggcacttacgagaagaccggtcttgctagattctaatcaagaggatgtcagaatgccatttgcctgagagatgcaggcttcatttttgattacttttttatttgtaacctatatagtataggattttttttgtcattttgtttcttctcgtacgagcttgctcctgatcagcctatctcgcagctgatgaatatcttgtggtaggggtttgggaaaatcattcgagtttgatgtttttcttggtatttcccactcctcttcagagtacagaagattaagtgagaggatccctggaccacaggtatctgatgcggccgcgcaaagttggtagatgtgacttccactgttgcttctggtataatccccattattgatgctcggcaattgactactgaatacgaactttctgaagatgtcaaaaagttccctgtcagtgaaattttgttggcgtctttgactactgaccgccccgatggtctattcactactttggtggctgactcttctaattactcgttgggcctggtgtactcgtccaaaaagtctattccggaggctataaggacacaaactggagtctaccaatctcgtcgtcacggtttgtggtataaaggtgctacatctggagcaactcaaaagttgctgggtatcgaattggattgtgatggagactgcttgaaatttgtggttgaacaaacaggtgttggtttctgtcacttggaacgcacttcctgttttggccaatcaaagggtcttagagccatggaagccaccttgtgggatcgtaagagcaatgctccagaaggttcttataccaaacggttatttgacgacgaagttttgttgaacgctaaaattagggaggaagctgatgaacttgcagaagctaaatccaaggaagatatagcctgggaatgtgctgacttattttattttgcattagttagatgtgccaagtacggtgtgacgttggacgaggtggagagaaacctggatatgaagtccctaaaggtcactagaaggaaaggagatgccaagccaggatacaccaaggaacaacctaaagaagaatccaaacctaaagaagtcccttctgaaggtcgtattgaattgtgcaaaattgacgtttctaaggcctcctcacaagaaattgaagatgcccttcgtcgtcctatagagaccttaattaagcgctcggtcgttcggctgcggcgagcggtatcagctcactcaaaggcggtaatacggttatccacagaatcaggggataacgcaggaaagaacatgtgagcaaaaggccagcaaaaggccaggaaccgtaaaaaggccgcgttgctggcgtttttccataggctccgcccccctgacgagcatcacaaaaatcgacgctcaagtcagaggtggcgaaacccgacaggactataaagataccaggcgtttccccctggaagctccctcgtgcgctctcctgttccgaccctgccgcttaccggatacctgtccgcctttctcccttcgggaagcgtggcgctttctcatagctcacgctgtaggtatctcagttcggtgtaggtcgttcgctccaagctgggctgtgtgcacgaaccccccgttcagcccgaccgctgcgccttatccggtaactatcgtcttgagtccaacccggtaagacacgacttatcgccactggcagcagccactggtaacaggattagcagagcgaggtatgtaggcggtgctacagagttcttgaagtggtggcctaactacggctacactagaagaacagtatttggtatctgcgctctgctgaagccagttaccttcggaaaaagagttggtagctcttgatccggcaaacaaaccaccgctggtagcggtggtttttttgtttgcaagcagcagattacgcgcagaaaaaaaggatctcaagaagatcctttgatcttttctacggggtctgacgctcagtggaacgaaaactcacgttaagggattttggtcatgagattatcaaagacgtcccagccaggacagaaatgcctcgacttcgctgctgcccaaggttgccgggtgacgcacaccgtggaaacggatgaaggcacgaacccagtggacataagcctgttcggttcgtaagctgtaatgcaagtagcgtatgcgctcacgcaactggtccagaaccttgaccgaacgcagcggtggtaacggcgcagtggcggttttcatggcttgttatgactgtttttttggggtacagtctatgcctcgggcatccaagcagcaagcgcgttacgccgtgggtcgatgtttgatgttatggagcagcaacgatgttacgcagcagggcagtcgccctaaaacaaagttaaacatcatgagggaagcggtgatcgccgaagtatcgactcaactatcagaggtagttggcgtcatcgagcgccatctcgaaccgacgttgctggccgtacatttgtacggctccgcagtggatggcggcctgaagccacacagtgatattgatttgctggttacggtgaccgtaaggcttgatgaaacaacgcggcgagctttgatcaacgaccttttggaaacttcggcttcccctggagagagcgagattctccgcgctgtagaagtcaccattgttgtgcacgacgacatcattccgtggcgttatccagctaagcgcgaactgcaatttggagaatggcagcgcaatgacattcttgcaggtatcttcgagccagccacgatcgacattgatctggctatcttgctgacaaaagcaagagaacatagcgttgccttggtaggtccagcggcggaggaactctttgatccggttcctgaacaggatctatttgaggcgctaaatgaaaccttaacgctatggaactcgccgcccgactgggctggtgatgagcgaaatgtagtgcttacgttgtcccgcatttggtacagcgcagtaaccggcaaaatcgcgccgaaggatgtcgctgccgactgggcaatggagcgcctgccggcccagtatcagcccgtcatacttgaagctagacaggcttatcttggacaagaagaagatcgcttggcctcgcgcgcagatcagttggaagaatttgtccactacgtgaaaggcgagatcaccaaggtagtcggcaaataactgtcagaccaagtttactcatatatactttagattgatttaaaacttcatttttaatttaaaaggatctaggtgaagatcctt

SEQ ID NO: 2698 - DNA, 7407 bp, synthetic construct
  misc_feature 1..7407: note = Description of Artificial Sequence: Synthetic polynucleotide
  source 1..7407: mol_type = other DNA
gcgatcgcggtctcagacacttcaaaaccgttttggatcattcctctcttctcggattcagagtagtctaacttgaaagttgaagtgttactccaatacgagaaaggtctattggccagataaacaaccaggggaggaatgtgatccgtgccttcaacaatgtctgtcaaatttctagcatcacaaccaaagaaggttggcttactcgaaagattcaagtttaggaaagtggtggtatcaggtacataagggaacgttgttccatttgcttgagaagaaaactgtctcatgtaggtgttgactaatgatgaaccgtttggccaagagaggtcagtgtctgcactgttgtcaaacgcaaagatgatatcaacgtcacgctccttttgaagtagaggctgcagagggacgttttggttatcctctccaccatcaaccaagtaaagggtgtcattttccgcaatggcacctactcctgcatacgtacttttgtagaaagggttgggggaatagatagcaatgtcgtcttcgtcttcgctaagtccagtcagaaaatgctcaatgatttggtaaattgctcctgaaagatcactcgtattcagttgcagaataaactgattaaacaacgaggatgaagttcccagcacgaaaccagtgttgtcaaatccagcaatgcaaccacgctcatcatctgcgttatttggaacaccattggtaacgttagtaccaagatatgtcaaatcagtaaacccgtacactgaacctcagcttttttgtagaaatgtcttggtgtcctcgtccaatcaggtagccatctctgaaatatctggctccgttgcaactccgaacgacctgctggcaacgtaaaattctccggggtaaaacttaaatgtggagtaatggaaccagaaacgtctcttcccttctctctccttccaccgcccgttaccgtccctaggaaattttactctgctggagagcttcttctacggcccccttgcagcaatgctcttcccagcattacgttgcgggtaaaacggaggtcgtgtacccgacctagcagcccagggatggaaaagtcccggccgtcgctggcaataatagcgggcggacgcatgtcatgagattattggaaaccaccagaatcgaatataaaaggcgaacacctttcccaattttggtttctcctgacccaaagactttaaatttaatttatttgtccctatttcaatcaattgaacaactatcaggcgcgccgaaacgatgagatttccttcaatttttactgctgttttattcgcagcatcctccgcattagctgctccagtcaacactacaacagaagatgaaacggcacaaattccggctgaagctgtcatcggttactcagatttagaaggggatttcgatgttgctgttttgccattttccaacagcacaaataacgggttattgtttataaatactactattgccagcattgctgctaaagaagaaggggtatctctcgagaaaagagaggctgaagcaaggtatcgctcatcgcgaaagtgaaacgtgatttcatgcgtcattttgaacattttgtaaatcttatttaataatgtgtgcggcaattcacatttaatttatgaatgttttcttaacatatcgcggcaactcaagaaacggcaggttcggatcttagctactagagattaaggaggtaaaaaaaatgagtgtgatcgctaaacaaatgacctacaaggtttatatgtcaggcacggtcaatggacactactttgaggtcgaaggtgatggaaaaggtaagccctacgagggggagcagacggtaaagctcactgtcaccaagggcggacctctgccatttgcttgggatattttatcaccacagtgtcagtacggaagcataccattcaccaagtaccctgaagatatccctgactatgtaaagcagtcattcccggagggctatacatgggagaggatcatgaactttgaagatggtgcagtgtgtactgtcagcaatgattccagcatccaaggcaactgtttcatctaccatgtcaagttctctggtttgaactttcctcccaatggacctgtcatgcagaagaaaacacagggctgggaacccaacactgagcgtctctttgcacgagatggaatgctgctaggaaacaactttatggctctgaagttagaaggaggcggtcactatttgtgtgaatttaaaactacttacaaggcaaagaagcctgtgaagatgccagggtatcactatgttgaccgcaaactggatgtaaccaatcacaacaaggattacacttcggttgagcagtgtgaaatttccattgcacgcaaacctgtggtcgcctaaggatctctccaaagcccgccgaaaggcgggcttttctgtgcgatgttgctgacagaggtgactacaaagatgacgacgataaagattacaaagacgatgacgataaggactataaagatgatgacgacaaataataacctgcaggagacatgactgttcctcagttcaagttgggcacttacgagaagaccggtcttgctagattctaatcaagaggatgtcagaatgccatttgcctgagagatgcaggcttcatttttgattacttttttatttgtaacctatatagtataggattttttttgtcattttgtttcttctcgtacgagcttgctcctgatcagcctatctcgcagctgatgaatatcttgtggtaggggtttgggaaaatcattcgagtttgatgtttttcttggtatttcccactcctcttcagagtacagaagattaagtgagaggatccttcagtaatgtcttgtttcttttgttgcagtggtgagccattttgacttcgtgaaagtttctttagaatagttgtttccagaggccaaacattccacccgtagtaaagtgcaagcgtaggaagaccaagactggcataaatcaggtataagtgtcgagcactggcaggtgatcttctgaaagtttctactagcagataagatccagtagtcatgcatatggcaacaatgtaccgtgtggatctaagaacgcgtcctactaaccttcgcattcgttggtccagtttgttgttatcgatcaacgtgacaaggttgtcgattccgcgtaagcatgcatacccaaggacgcctgttgcaattccaagtgagccagttccaacaatctttgtaatattagagcacttcattgtgttgcgcttgaaagtaaaatgcgaacaaattaagagataatctcgaaaccgcgacttcaaacgccaatatgatgtgcggcacacaataagcgttcatatccgctgggtgactttctcgctttaaaaaattatccgaaaaaatttttgacggctagctcagtcctaggtacgctagcattaaagaggagaaaatgagccatattcaacgggaaacgtcttgctcgaggccgcgattaaattccaacatggatgctgatttatatgggtataaatgggctcgcgataatgtcgggcaatcaggtgcgacaatctatcgattgtatgggaagcccgatgcgccagagttgtttctgaaacatggcaaaggtagcgttgccaatgatgttacagatgagatggtcagactaaactggctgacggaatttatgcctcttccgaccatcaagcattttatccgtactcctgatgatgcatggttactcaccactgcgatcccagggaaaacagcattccaggtattagaagaatatcctgattcaggtgaaaatattgttgatgcgctggcagtgttcctgcgccggttgcattcgattcctgtttgtaattgtccttttaacagcgatcgcgtatttcgtctcgctcaggcgcaatcacgaatgaataacggtttggttgatgcgagtgattttgatgacgagcgtaatggctggcctgttgaacaagtctggaaagaaatgcataagcttttgccattctcaccggattcagtcgtcactcatggtgatttctcacttgataaccttatttttgacgaggggaaattaataggttgtattgatgttggacgagtcggaatcgcagaccgataccaggatcttgccatcctatggaactgcctcggtgagttttctccttcattacagaaacggctttttcaaaaatatggtattgataatcctgatatgaataaattgcagtttcatttgatgctcgatgagtttttctaacacgtccgacggcggcccacgggtcccaggcctcggagatccgtcccccttttcctttgtcgatatcatgtaattagttatgtcacgcttacattcacgccctccccccacatccgctctaaccgaaaaggaaggagttagacaacctgaagtctaggtccctatttatttttttatagttatgttagtattaagaacgttatttatatttcaaatttttcttttttttctgtacagacgcgtgtacgcatgtaacattatactgaaaaccttgcttgagaaggttttgggacgctcgaaggctttaatttgcaagctgcggccgcacatggcactgtctgggaacctgttccattggtccaagagagggttccaagatcgtcaaatggggtggtgttttggatcacagatctaacgtttacggagtcaagggcctgaaggttggtgacttgtccgtctgtccagacaatgttggttgtaacacctacaccaccgctcttttgatcggtgaaaagactgccaccttggttggtgaagacttaggatacacaggtgaggccttagacatgactgtacctcagttcaagttgggcacttacgagaagactggtcttgctagattctagtttatgttgtatctatgaatatttttttacatggtggatttgttccaatctagttgttagttatttgtcgttatagtcactaatacagttaccatcggaatcttttcatttctttttatacgtacgtatatgtactagatgaagaatgcgacaaggccgaccaacagcaatggtgcttggtaccaaagtttggaaggtgctaccgaattggccgatgatattgaagtggagttgtcattctcctcattggttgctccagtagtggtaaaattaacggggatatcttcggtggaagtgtcaatatcaccgttccaacaataattctcaaaacatcttctacattgctctgtttgtgttgcattggatctctcctgctgtctacgaatgattgcacatccaacacaagtacgccattcttcatcaatagtcatgttcaaacgagacgacaagagaccttaattaagcgctcggtcgttcggctgcggcgagcggtatcagctcactcaaaggcggtaatacggttatccacagaatcaggggataacgcaggaaagaacatgtgagcaaaaggccagcaaaaggccaggaaccgtaaaaaggccgcgttgctggcgtttttccataggctccgcccccctgacgagcatcacaaaaatcgacgctcaagtcagaggtggcgaaacccgacaggactataaagataccaggcgtttccccctggaagctccctcgtgcgctctcctgttccgaccctgccgcttaccggatacctgtccgcctttctcccttcgggaagcgtggcgctttctcatagctcacgctgtaggtatctcagttcggtgtaggtcgttcgctccaagctgggctgtgtgcacgaaccccccgttcagcccgaccgctgcgccttatccggtaactatcgtcttgagtccaacccggtaagacacgacttatcgccactggcagcagccactggtaacaggattagcagagcgaggtatgtaggcggtgctacagagttcttgaagtggtggcctaactacggctacactagaagaacagtatttggtatctgcgctctgctgaagccagttaccttcggaaaaagagttggtagctcttgatccggcaaacaaaccaccgctggtagcggtggtttttttgtttgcaagcagcagattacgcgcagaaaaaaaggatctcaagaagatcctttgatcttttctacggggtctgacgctcagtggaacgaaaactcacgttaagggattttggtcatgagattatcaaagacgtcccagccaggacagaaatgcctcgacttcgctgctgcccaaggttgccgggtgacgcacaccgtggaaacggatgaaggcacgaacccagtggacataagcctgttcggttcgtaagctgtaatgcaagtagcgtatgcgctcacgcaactggtccagaaccttgaccgaacgcagcggtggtaacggcgcagtggcggttttcatggcttgttatgactgtttttttggggtacagtctatgcctcgggcatccaagcagcaagcgcgttacgccgtgggtcgatgtttgatgttatggagcagcaacgatgttacgcagcagggcagtcgccctaaaacaaagttaaacatcatgagggaagcggtgatcgccgaagtatcgactcaactatcagaggtagttggcgtcatcgagcgccatctcgaaccgacgttgctggccgtacatttgtacggctccgcagtggatggcggcctgaagccacacagtgatattgatttgctggttacggtgaccgtaaggcttgatgaaacaacgcggcgagctttgatcaacgaccttttggaaacttcggcttcccctggagagagcgagattctccgcgctgtagaagtcaccattgttgtgcacgacgacatcattccgtggcgttatccagctaagcgcgaactgcaatttggagaatggcagcgcaatgacattcttgcaggtatcttcgagccagccacgatcgacattgatctggctatcttgctgacaaaagcaagagaacatagcgttgccttggtaggtccagcggcggaggaactctttgatccggttcctgaacaggatctatttgaggcgctaaatgaaaccttaacgctatggaactcgccgcccgactgggctggtgatgagcgaaatgtagtgcttacgttgtcccgcatttggtacagcgcagtaaccggcaaaatcgcgccgaaggatgtcgctgccgactgggcaatggagcgcctgccggcccagtatcagcccgtcatacttgaagctagacaggcttatcttggacaagaagaagatcgcttggcctcgcgcgcagatcagttggaagaatttgtccactacgtgaaaggcgagatcaccaaggtagtcggcaaataactgtcagaccaagtttactcatatatactttagattgatttaaaacttcatttttaatttaaaaggatctaggtgaagatcctt

SEQ ID NO: 2699 - DNA, 7098 bp, synthetic construct
  misc_feature 1..7098: note = Description of Artificial Sequence: Synthetic polynucleotide
  source 1..7098: mol_type = other DNA
gcgatcgcggtctcacagatgacagagttgtcaagaacttgaccactttgttgttcgacacagctttgttgacttccggtttcactttggatgagccaacttctttcgctgccagaatcaacggtttgatctccattggtttgaacatcgatgaggaggaagagaaagagccagaacaggctactgaagctccaagtgaagaagctgttgctgagtctgccatggaggaggttgactagttgaatttaggtatatatagtgactgtgatatttagctaatgaaatctaattggatatttagaatgcctcatctcgtagcctatcaattactattaggccatctcttatgggcccttctttgaaattgcattcaaggggggatgggactattttgaatttgaagtttggactctgtgagctgtttggccaattgaagtcatccacttgtacacagggattcaccagtagtttagaacaattctctatcgttattctcttgtcgtctttggcaatacaagcgtcgatgactgagttggtgactttatgaagtctaagttgatatgagtttgaaattatgaaacagttttttacactggacatgtagatagggcccttgatgtttaggaagaggatacagtttgagatgttggagatgtgtgtggagggagcgaccacttttaaaaccacatgatccagacgttgctcagttatcgaagtttcggaaacaacctcagcttttttgtagaaatgtcttggtgtcctcgtccaatcaggtagccatctctgaaatatctggctccgttgcaactccgaacgacctgctggcaacgtaaaattctccggggtaaaacttaaatgtggagtaatggaaccagaaacgtctcttcccttctctctccttccaccgcccgttaccgtccctaggaaattttactctgctggagagcttcttctacggcccccttgcagcaatgctcttcccagcattacgttgcgggtaaaacggaggtcgtgtacccgacctagcagcccagggatggaaaagtcccggccgtcgctggcaataatagcgggcggacgcatgtcatgagattattggaaaccaccagaatcgaatataaaaggcgaacacctttcccaattttggtttctcctgacccaaagactttaaatttaatttatttgtccctatttcaatcaattgaacaactatcaggcgcgccgaaacgatgagatttccttcaatttttactgctgttttattcgcagcatcctccgcattagctgctccagtcaacactacaacagaagatgaaacggcacaaattccggctgaagctgtcatcggttactcagatttagaaggggatttcgatgttgctgttttgccattttccaacagcacaaataacgggttattgtttataaatactactattgccagcattgctgctaaagaagaaggggtatctctcgagaaaagagaggctgaagcaaggtatcgctcatcgcgaaagtgaaacgtgatttcatgcgtcattttgaacattttgtaaatcttatttaataatgtgtgcggcaattcacatttaatttatgaatgttttcttaacatatcgcggcaactcaagaaacggcaggttcggatcttagctactagagattaaggaggtaaaaaaaatgagtgtgatcgctaaacaaatgacctacaaggtttatatgtcaggcacggtcaatggacactactttgaggtcgaaggtgatggaaaaggtaagccctacgagggggagcagacggtaaagctcactgtcaccaagggcggacctctgccatttgcttgggatattttatcaccacagtgtcagtacggaagcataccattcaccaagtaccctgaagatatccctgactatgtaaagcagtcattcccggagggctatacatgggagaggatcatgaactttgaagatggtgcagtgtgtactgtcagcaatgattccagcatccaaggcaactgtttcatctaccatgtcaagttctctggtttgaactttcctcccaatggacctgtcatgcagaagaaaacacagggctgggaacccaacactgagcgtctctttgcacgagatggaatgctgctaggaaacaactttatggctctgaagttagaaggaggcggtcactatttgtgtgaatttaaaactacttacaaggcaaagaagcctgtgaagatgccagggtatcactatgttgaccgcaaactggatgtaaccaatcacaacaaggattacacttcggttgagcagtgtgaaatttccattgcacgcaaacctgtggtcgcctaaggatctctccaaagcccgccgaaaggcgggcttttctgtgcgatgttgctgacagaggtgactacaaagatgacgacgataaagattacaaagacgatgacgataaggactataaagatgatgacgacaaataataacctgcaggagacatgactgttcctcagttcaagttgggcacttacgagaagaccggtcttgctagattctaatcaagaggatgtcagaatgccatttgcctgagagatgcaggcttcatttttgattacttttttatttgtaacctatatagtataggattttttttgtcattttgtttcttctcgtacgagcttgctcctgatcagcctatctcgcagctgatgaatatcttgtggtaggggtttgggaaaatcattcgagtttgatgtttttcttggtatttcccactcctcttcagagtacagaagattaagtgagaggatccttcagtaatgtcttgtttcttttgttgcagtggtgagccattttgacttcgtgaaagtttctttagaatagttgtttccagaggccaaacattccacccgtagtaaagtgcaagcgtaggaagaccaagactggcataaatcaggtataagtgtcgagcactggcaggtgatcttctgaaagtttctactagcagataagatccagtagtcatgcatatggcaacaatgtaccgtgtggatctaagaacgcgtcctactaaccttcgcattcgttggtccagtttgttgttatcgatcaacgtgacaaggttgtcgattccgcgtaagcatgcatacccaaggacgcctgttgcaattccaagtgagccagttccaacaatctttgtaatattagagcacttcattgtgttgcgcttgaaagtaaaatgcgaacaaattaagagataatctcgaaaccgcgacttcaaacgccaatatgatgtgcggcacacaataagcgttcatatccgctgggtgactttctcgctttaaaaaattatccgaaaaaatttttgacggctagctcagtcctaggtacgctagcattaaagaggagaaaatgactactcttgatgacacagcctacagatataggacatcagttccgggtgacgcagaggctatcgaagccttggacggttcattcactactgatacggtgtttagagtcaccgctacaggtgatggcttcaccttgagagaggttcctgtagacccacccttaacgaaagttttccctgatgacgaatcggatgacgagtctgatgctggtgaggacggtgaccctgattccagaacatttgtcgcatacggagatgatggtgacctggctggctttgttgtggtgtcctacagcggatggaatcgtagactcacagttgaggacatcgaagttgcacctgaacatcgtggtcacggtgttggtcgtgcactgatgggactggcaacagagtttgctagagaaagaggagccggacatttgtggttagaagtgaccaatgtcaacgctcctgctattcacgcatataggcgaatgggtttcactttgtgcggtcttgatactgctttgtatgacggaactgcttctgatggtgaacaagctctttacatgagtatgccatgtccatagcacgtccgacggcggcccacgggtcccaggcctcggagatccgtcccccttttcctttgtcgatatcatgtaattagttatgtcacgcttacattcacgccctccccccacatccgctctaaccgaaaaggaaggagttagacaacctgaagtctaggtccctatttatttttttatagttatgttagtattaagaacgttatttatatttcaaatttttcttttttttctgtacagacgcgtgtacgcatgtaacattatactgaaaaccttgcttgagaaggttttgggacgctcgaaggctttaatttgcaagctgcggccgcaagaagttgattgagactttcaacgagattgctgaagacaaggaacaattcgagaagttttacagtgctttctccaagaacttgaagttgggtgtccatgaagacagccaaaacagatccgcattggccaagttgctgagatttaactccaccaagtctactgaggagctaacctcattctctgactacgtcaccagaatgccagagcaccagaagaacatctacttcattaccggtgagtctgtcaaggctcttgagaaatctccattcttggatgctttgaaggagaagaactttgaggtcctattgctgaccgatcctattgatgagtacgctatgactcaattgaaagagattgaggacaagaaattggttgacatcactaaagactttgagctggaagagtctgaggaggagaagaaggctagagaggaagaggttaaagatttcgagcctttgactaaagccctgaaagagattttgggtgacaaggttgagaaggttgtagtttcctacaagctggttgactctcctgctgctattagaacttcccaattcggctggtctgctaacatggaaagaattatgaaggctcaagctctgagagacaccaacaccatgtcctcgtacatggcttcaaagaagatcttcgagatctctccaaagtcgccaatcattaaggctttgagaaagaaggttgaggctaccggtacagaagagaccttaattaagcgctcggtcgttcggctgcggcgagcggtatcagctcactcaaaggcggtaatacggttatccacagaatcaggggataacgcaggaaagaacatgtgagcaaaaggccagcaaaaggccaggaaccgtaaaaaggccgcgttgctggcgtttttccataggctccgcccccctgacgagcatcacaaaaatcgacgctcaagtcagaggtggcgaaacccgacaggactataaagataccaggcgtttccccctggaagctccctcgtgcgctctcctgttccgaccctgccgcttaccggatacctgtccgcctttctcccttcgggaagcgtggcgctttctcatagctcacgctgtaggtatctcagttcggtgtaggtcgttcgctccaagctgggctgtgtgcacgaaccccccgttcagcccgaccgctgcgccttatccggtaactatcgtcttgagtccaacccggtaagacacgacttatcgccactggcagcagccactggtaacaggattagcagagcgaggtatgtaggcggtgctacagagttcttgaagtggtggcctaactacggctacactagaagaacagtatttggtatctgcgctctgctgaagccagttaccttcggaaaaagagttggtagctcttgatccggcaaacaaaccaccgctggtagcggtggtttttttgtttgcaagcagcagattacgcgcagaaaaaaaggatctcaagaagatcctttgatcttttctacggggtctgacgctcagtggaacgaaaactcacgttaagggattttggtcatgagattatcaaagacgtcccagccaggacagaaatgcctcgacttcgctgctgcccaaggttgccgggtgacgcacaccgtggaaacggatgaaggcacgaacccagtggacataagcctgttcggttcgtaagctgtaatgcaagtagcgtatgcgctcacgcaactggtccagaaccttgaccgaacgcagcggtggtaacggcgcagtggcggttttcatggcttgttatgactgtttttttggggtacagtctatgcctcgggcatccaagcagcaagcgcgttacgccgtgggtcgatgtttgatgttatggagcagcaacgatgttacgcagcagggcagtcgccctaaaacaaagttaaacatcatgagggaagcggtgatcgccgaagtatcgactcaactatcagaggtagttggcgtcatcgagcgccatctcgaaccgacgttgctggccgtacatttgtacggctccgcagtggatggcggcctgaagccacacagtgatattgatttgctggttacggtgaccgtaaggcttgatgaaacaacgcggcgagctttgatcaacgaccttttggaaacttcggcttcccctggagagagcgagattctccgcgctgtagaagtcaccattgttgtgcacgacgacatcattccgtggcgttatccagctaagcgcgaactgcaatttggagaatggcagcgcaatgacattcttgcaggtatcttcgagccagccacgatcgacattgatctggctatcttgctgacaaaagcaagagaacatagcgttgccttggtaggtccagcggcggaggaactctttgatccggttcctgaacaggatctatttgaggcgctaaatgaaaccttaacgctatggaactcgccgcccgactgggctggtgatgagcgaaatgtagtgcttacgttgtcccgcatttggtacagcgcagtaaccggcaaaatcgcgccgaaggatgtcgctgccgactgggcaatggagcgcctgccggcccagtatcagcccgtcatacttgaagctagacaggcttatcttggacaagaagaagatcgcttggcctcgcgcgcagatcagttggaagaatttgtccactacgtgaaaggcgagatcaccaaggtagtcggcaaataactgtcagaccaagtttactcatatatactttagattgatttaaaacttcatttttaatttaaaaggatctaggtgaagatcctt

SEQ ID NO: 2700 - DNA, 7382 bp, synthetic construct
  misc_feature 1..7382: note = Description of Artificial Sequence: Synthetic polynucleotide
  source 1..7382: mol_type = other DNA
gcgatcgcggtctcatgatatatttgtattttgttcgttaacattgatgttttcttcatttactgttattgtttgtaactttgatcgatttatcttttctactttactgtaatatggctggcgggtgagccttgaactccctgtattactttaccttgctattacttaatctattgactagcagcgacctcttcaaccgaagggcaagtacacagcaagttcatgtctccgtaagtgtcatcaaccctggaaacagtgggccatgtcttttgctccttcaaaaatggcaatgggtaggctgcctcctctcttgtgtatcctctctgggaccactcagcgtcacttgtgctaataatatcttttaggttgtgtggggagttgtgcaagattgcaccatctgtttctccgttttctactttacggatttcttctctaatagagatcatagagtcaatgaatctgtctaattcttctttgtattcggattcagttggttctaccatcaatgtgcccggaatagggaacgacatggtaggagcatggaatccataatcttgcagacgcttggccacatcaatggcctcaattccgaatttcttgaatggtctaagatcaataatgaactcatggccacagtacttgtcctcagcttttttgtagaaatgtcttggtgtcctcgtccaatcaggtagccatctctgaaatatctggctccgttgcaactccgaacgacctgctggcaacgtaaaattctccggggtaaaacttaaatgtggagtaatggaaccagaaacgtctcttcccttctctctccttccaccgcccgttaccgtccctaggaaattttactctgctggagagcttcttctacggcccccttgcagcaatgctcttcccagcattacgttgcgggtaaaacggaggtcgtgtacccgacctagcagcccagggatggaaaagtcccggccgtcgctggcaataatagcgggcggacgcatgtcatgagattattggaaaccaccagaatcgaatataaaaggcgaacacctttcccaattttggtttctcctgacccaaagactttaaatttaatttatttgtccctatttcaatcaattgaacaactatcaggcgcgccgaaacgatgagatttccttcaatttttactgctgttttattcgcagcatcctccgcattagctgctccagtcaacactacaacagaagatgaaacggcacaaattccggctgaagctgtcatcggttactcagatttagaaggggatttcgatgttgctgttttgccattttccaacagcacaaataacgggttattgtttataaatactactattgccagcattgctgctaaagaagaaggggtatctctcgagaaaagagaggctgaagcaaggtatcgctcatcgcgaaagtgaaacgtgatttcatgcgtcattttgaacattttgtaaatcttatttaataatgtgtgcggcaattcacatttaatttatgaatgttttcttaacatatcgcggcaactcaagaaacggcaggttcggatcttagctactagagattaaggaggtaaaaaaaatgagtgtgatcgctaaacaaatgacctacaaggtttatatgtcaggcacggtcaatggacactactttgaggtcgaaggtgatggaaaaggtaagccctacgagggggagcagacggtaaagctcactgtcaccaagggcggacctctgccatttgcttgggatattttatcaccacagtgtcagtacggaagcataccattcaccaagtaccctgaagatatccctgactatgtaaagcagtcattcccggagggctatacatgggagaggatcatgaactttgaagatggtgcagtgtgtactgtcagcaatgattccagcatccaaggcaactgtttcatctaccatgtcaagttctctggtttgaactttcctcccaatggacctgtcatgcagaagaaaacacagggctgggaacccaacactgagcgtctctttgcacgagatggaatgctgctaggaaacaactttatggctctgaagttagaaggaggcggtcactatttgtgtgaatttaaaactacttacaaggcaaagaagcctgtgaagatgccagggtatcactatgttgaccgcaaactggatgtaaccaatcacaacaaggattacacttcggttgagcagtgtgaaatttccattgcacgcaaacctgtggtcgcctaaggatctctccaaagcccgccgaaaggcgggcttttctgtgcgatgttgctgacagaggtgactacaaagatgacgacgataaagattacaaagacgatgacgataaggactataaagatgatgacgacaaataataacctgcaggagacatgactgttcctcagttcaagttgggcacttacgagaagaccggtcttgctagattctaatcaagaggatgtcagaatgccatttgcctgagagatgcaggcttcatttttgattacttttttatttgtaacctatatagtataggattttttttgtcattttgtttcttctcgtacgagcttgctcctgatcagcctatctcgcagctgatgaatatcttgtggtaggggtttgggaaaatcattcgagtttgatgtttttcttggtatttcccactcctcttcagagtacagaagattaagtgagaggatccttcagtaatgtcttgtttcttttgttgcagtggtgagccattttgacttcgtgaaagtttctttagaatagttgtttccagaggccaaacattccacccgtagtaaagtgcaagcgtaggaagaccaagactggcataaatcaggtataagtgtcgagcactggcaggtgatcttctgaaagtttctactagcagataagatccagtagtcatgcatatggcaacaatgtaccgtgtggatctaagaacgcgtcctactaaccttcgcattcgttggtccagtttgttgttatcgatcaacgtgacaaggttgtcgattccgcgtaagcatgcatacccaaggacgcctgttgcaattccaagtgagccagttccaacaatctttgtaatattagagcacttcattgtgttgcgcttgaaagtaaaatgcgaacaaattaagagataatctcgaaaccgcgacttcaaacgccaatatgatgtgcggcacacaataagcgttcatatccgctgggtgactttctcgctttaaaaaattatccgaaaaaatttttgacggctagctcagtcctaggtacgctagcattaaagaggagaaaatgaaaaagccagagctgacagccacctctgtagaaaagtttttgattgagaaattcgactcagttagcgatctgatgcagttgtcggaaggtgaggaatcccgtgcattttccttcgatgttggtggacgtggttatgtccttcgtgttaattcctgcgccgacggtttctacaaagacagatacgtgtacaggcacttcgcttccgctgctttgccaattcctgaggtccttgatattggagaattttccgagtctttgacatattgtatttctaggcgagcacaaggtgttactctacaagatttgcctgaaacagaattgcccgcagtactacagccagtggccgaagctatggacgcaatagcagccgctgacttgagtcagacgagtggttttggtccatttggaccccaaggtatcggtcaatacactacttggagagacttcatctgtgcaattgctgatccgcatgtgtatcattggcaaacggttatggatgacactgtatctgcatccgttgctcaggctttggatgagctgatgctttgggccgaagattgtcctgaagtcagacacctggtacacgctgatttcggctcaaataatgtgttgaccgacaacggtaggatcacagcagtgatcgactggtcagaggcaatgtttggagattcacaatacgaggtggctaacatctttttctggcgtccttggctcgcatgcatggaacaacaaactcgttatttcgagagaaggcatccagagttagctggttctcctagacttagagcctacatgctgagaattggattagatcagttgtatcaaagcttagttgatggcaattttgatgacgctgcttgggctcaaggaagatgtgacgctatcgtcagaagtggtgcaggcactgtcggtagaacacaaatagcaagacgtagcgctgctgtttggactgacggatgtgttgaggttttagccgacagtggtaacaggcgtccatccacaagaccaagagctaaggaataacacgtccgacggcggcccacgggtcccaggcctcggagatccgtcccccttttcctttgtcgatatcatgtaattagttatgtcacgcttacattcacgccctccccccacatccgctctaaccgaaaaggaaggagttagacaacctgaagtctaggtccctatttatttttttatagttatgttagtattaagaacgttatttatatttcaaatttttcttttttttctgtacagacgcgtgtacgcatgtaacattatactgaaaaccttgcttgagaaggttttgggacgctcgaaggctttaatttgcaagctgcggccgcggtgtcatcaaggctggtatggtcgtcactttcgccccagctggtgtcactaccgaagtcaagtcggtcgagatgcaccacgagcaattggagcaaggtgtcccaggtgacaacgttggattcaacgtcaagaacgtttccgtcaaggaaatcagaagaggtaacgtctgtggtgactccaagaacgacccaccaaaggccgctgaatctttcaacgcccaggtcattatcttgaaccacccaggtcaaatctctgctggttacgctccagttttggactgtcacaccgctcacattgcttgtaagttcgacgagttgattgagaagattgacagaagaaccggtaagaagactgaggagaaccctaagttcatcaagtccggtgacgccgctatcgtcaagttggtcccatctaagccaatgtgtgttgaggccttcactgactacccacctttaggaagattcgctgtcagagacatgagacaaactgttgctgtcggtgttatcaagtccgttgtcaagactgacaaggctggtaaggtcaccaaggctgctcaaaaggccgctaagaaatagattgcttgaagctttaatttattttattaacataataataatacaagcatgatagagaccttaattaagcgctcggtcgttcggctgcggcgagcggtatcagctcactcaaaggcggtaatacggttatccacagaatcaggggataacgcaggaaagaacatgtgagcaaaaggccagcaaaaggccaggaaccgtaaaaaggccgcgttgctggcgtttttccataggctccgcccccctgacgagcatcacaaaaatcgacgctcaagtcagaggtggcgaaacccgacaggactataaagataccaggcgtttccccctggaagctccctcgtgcgctctcctgttccgaccctgccgcttaccggatacctgtccgcctttctcccttcgggaagcgtggcgctttctcatagctcacgctgtaggtatctcagttcggtgtaggtcgttcgctccaagctgggctgtgtgcacgaaccccccgttcagcccgaccgctgcgccttatccggtaactatcgtcttgagtccaacccggtaagacacgacttatcgccactggcagcagccactggtaacaggattagcagagcgaggtatgtaggcggtgctacagagttcttgaagtggtggcctaactacggctacactagaagaacagtatttggtatctgcgctctgctgaagccagttaccttcggaaaaagagttggtagctcttgatccggcaaacaaaccaccgctggtagcggtggtttttttgtttgcaagcagcagattacgcgcagaaaaaaaggatctcaagaagatcctttgatcttttctacggggtctgacgctcagtggaacgaaaactcacgttaagggattttggtcatgagattatcaaagacgtcccagccaggacagaaatgcctcgacttcgctgctgcccaaggttgccgggtgacgcacaccgtggaaacggatgaaggcacgaacccagtggacataagcctgttcggttcgtaagctgtaatgcaagtagcgtatgcgctcacgcaactggtccagaaccttgaccgaacgcagcggtggtaacggcgcagtggcggttttcatggcttgttatgactgtttttttggggtacagtctatgcctcgggcatccaagcagcaagcgcgttacgccgtgggtcgatgtttgatgttatggagcagcaacgatgttacgcagcagggcagtcgccctaaaacaaagttaaacatcatgagggaagcggtgatcgccgaagtatcgactcaactatcagaggtagttggcgtcatcgagcgccatctcgaaccgacgttgctggccgtacatttgtacggctccgcagtggatggcggcctgaagccacacagtgatattgatttgctggttacggtgaccgtaaggcttgatgaaacaacgcggcgagctttgatcaacgaccttttggaaacttcggcttcccctggagagagcgagattctccgcgctgtagaagtcaccattgttgtgcacgacgacatcattccgtggcgttatccagctaagcgcgaactgcaatttggagaatggcagcgcaatgacattcttgcaggtatcttcgagccagccacgatcgacattgatctggctatcttgctgacaaaagcaagagaacatagcgttgccttggtaggtccagcggcggaggaactctttgatccggttcctgaacaggatctatttgaggcgctaaatgaaaccttaacgctatggaactcgccgcccgactgggctggtgatgagcgaaatgtagtgcttacgttgtcccgcatttggtacagcgcagtaaccggcaaaatcgcgccgaaggatgtcgctgccgactgggcaatggagcgcctgccggcccagtatcagcccgtcatacttgaagctagacaggcttatcttggacaagaagaagatcgcttggcctcgcgcgcagatcagttggaagaatttgtccactacgtgaaaggcgagatcaccaaggtagtcggcaaataactgtcagaccaagtttactcatatatactttagattgatttaaaacttcatttttaatttaaaaggatctaggtgaagatcctt

SEQ ID NO: 2701 - DNA, 7096 bp, synthetic construct
  misc_feature 1..7096: note = Description of Artificial Sequence: Synthetic polynucleotide
  source 1..7096: mol_type = other DNA
gcgatcgcggtctcactatccagaaaacggaacagattatggaattagtcaaaccaattgtcgacaatgttcgtcaaaatggtgacaaagcccttttagaactaactgccaagtttgatggagtcgctttgaagacacctgtgttagaagctcctttcccagaggaacttatgcaattgccagataacgttaagagagccattgatctctctatagataacgtcaggaaattccatgaagctcaactaacggagacgttgcaagttgagacttgccctggtgtagtctgctctcgttttgcaagacctattgagaaagttggcctctatattcctggtggaaccgcaattctgccttccacttccctgatgctgggtgttcctgccaaagttgctggttgcaaagaaattgtttttgcatctccacctaagaaggatggtacccttaccccagaagtcatctacgttgcccacaaggttggtgctaagtgtatcgtgctagcaggaggcgcccaggcagtagctgctatggcttacggaacagaaactgttcctaagtgtgacaaaatatttggtccaggaaaccagttcgttactgctgccaagatgatggttcaaaatgacacatcagccctgtgtagtattgacatgcctgctgggccttctgaagttctagttattgctgataaatacgctgatccagatttcgttgcctcagaccttctgtctcaagctgaacatggtattgattcccaggtgattctgttggctgtcgatatgacagacaaggagcttgccagaattgaagatgctgttcacaaccaagctgtgcagttgccaagggttgaaattgtacgcaagtgtattgcacactctacaaccctatcggttgcaacctacgagcaggctttggaaatgtccaatcagtacgctcctgaacacttgatcctgcaaatcgagaatgcttcttcttatgttgatcaagtacaacacgctggatctgtgtttgttggtgcctactctccagagagttgtggagattactcctccggtaccaaccacactttgccaacgtacggatatgcccgtcaatacagcggagttaacactgcaaccttccagaagttcatcacttcacaagacgtaactcctgagggactgaaacatattggccaagcagtgatggatctggctgctgttgaaggtctagatgctcaccgcaatgctgttaaggttcgtatggagaaactgggacttatttaattatttagagattttaacttacatttagattcgatagatctaaccggcatctaacatccagtgtttctaatctagtgaatcgagatcaagtctcactctgaacataataaataaggtctaaccccatggaattacatgtccccttgggttctgagattgtcttacccggtggggaaagagccatactcaagttcgtaggaaatgtggagtcaaagtctgggatttttgctggtgttgaactgattggtcaaatgagtggaaaaggaaaggcctcgatggcccagatctagggagggcatcattgaggtttccacaaaaggaagaaacatggatccagagacatcaacagagaggaaagcgggtagtgaagccgaagccacaacacagcccgatttggaagggagttcacaatcaaggtgagtccagccattttttttcttttttttttttttattcaggtgaacccacctaactatttttaactgggatccagtgagctcgctgggtgaaagccaaccatcttttgtttcggggaaccgtgctcgccccgtaaagttaatttttttttcccgcgcagctttaatctttcggcagagaaggcgttttcatcgtagcgtgggaacagaataatcagttcatgtgctatacaggcacatggcagcagtcactattttgctttttaaccttaaagtcgttcatcaatcattaactgaccaatcagattttttgcatttgccacttatctaaaaatacttttgtatctcgcagatacgttcagtggtttccaggacaacacccaaaaaaaggtatcaatgccactaggcagtcggttttatttttggtcacccacgcaaagaagcacccacctcttttaggttttaagttgtgggaacagtaacaccgcctagagcttcaggaaaaaccagtacctgtgaccgcaattcaccatgatgcagaatgttaatttaaacgagtgccaaatcaagatttcaacagacaaatcaatcgatccatagttacccattccagccttttcgtcgtcgagcctgcttcattcctgcctcaggtgcataactttgcatgaaaagtccagattagggcagattttgagtttaaaataggaaatataaacaaatataccgcgaaaaaggtttgtttatagcttttcgcctggtgccgtacggtataaatacatactctcctcccccccctggttctctttttcttttgttacttacattttaccgttccgtcactcgcttcactcaacaacaaaaggcgcgccgaaacgatgagatttccttcaatttttactgctgttttattcgcagcatcctccgcattagctgctccagtcaacactacaacagaagatgaaacggcacaaattccggctgaagctgtcatcggttactcagatttagaaggggatttcgatgttgctgttttgccattttccaacagcacaaataacgggttattgtttataaatactactattgccagcattgctgctaaagaagaaggggtatctctcgagaaaagagaggctgaagcaaggtatcgctcatcgcgaaagtgaaacgtgatttcatgcgtcattttgaacattttgtaaatcttatttaataatgtgtgcggcaattcacatttaatttatgaatgttttcttaacatatcgcggcaactcaagaaacggcaggttcggatcttagctactagagattaaggaggtaaaaaaaatgagtgtgatcgctaaacaaatgacctacaaggtttatatgtcaggcacggtcaatggacactactttgaggtcgaaggtgatggaaaaggtaagccctacgagggggagcagacggtaaagctcactgtcaccaagggcggacctctgccatttgcttgggatattttatcaccacagtgtcagtacggaagcataccattcaccaagtaccctgaagatatccctgactatgtaaagcagtcattcccggagggctatacatgggagaggatcatgaactttgaagatggtgcagtgtgtactgtcagcaatgattccagcatccaaggcaactgtttcatctaccatgtcaagttctctggtttgaactttcctcccaatggacctgtcatgcagaagaaaacacagggctgggaacccaacactgagcgtctctttgcacgagatggaatgctgctaggaaacaactttatggctctgaagttagaaggaggcggtcactatttgtgtgaatttaaaactacttacaaggcaaagaagcctgtgaagatgccagggtatcactatgttgaccgcaaactggatgtaaccaatcacaacaaggattacacttcggttgagcagtgtgaaatttccattgcacgcaaacctgtggtcgcctaaggatctctccaaagcccgccgaaaggcgggcttttctgtgcgatgttgctgacagaggtgactacaaagatgacgacgataaagattacaaagacgatgacgataaggactataaagatgatgacgacaaataataacctgcaggagacatgactgttcctcagttcaagttgggcacttacgagaagaccggtcttgctagattctaatcaagaggatgtcagaatgccatttgcctgagagatgcaggcttcatttttgattacttttttatttgtaacctatatagtataggattttttttgtcattttgtttcttctcgtacgagcttgctcctgatcagcctatctcgcagctgatgaatatcttgtggtaggggtttgggaaaatcattcgagtttgatgtttttcttggtatttcccactcctcttcagagtacagaagattaagtgagaggatccctggaccacaggtatctgatgcggccgcgcaaagttggtagatgtgacttccactgttgcttctggtataatccccattattgatgctcggcaattgactactgaatacgaactttctgaagatgtcaaaaagttccctgtcagtgaaattttgttggcgtctttgactactgaccgccccgatggtctattcactactttggtggctgactcttctaattactcgttgggcctggtgtactcgtccaaaaagtctattccggaggctataaggacacaaactggagtctaccaatctcgtcgtcacggtttgtggtataaaggtgctacatctggagcaactcaaaagttgctgggtatcgaattggattgtgatggagactgcttgaaatttgtggttgaacaaacaggtgttggtttctgtcacttggaacgcacttcctgttttggccaatcaaagggtcttagagccatggaagccaccttgtgggatcgtaagagcaatgctccagaaggttcttataccaaacggttatttgacgacgaagttttgttgaacgctaaaattagggaggaagctgatgaacttgcagaagctaaatccaaggaagatatagcctgggaatgtgctgacttattttattttgcattagttagatgtgccaagtacggtgtgacgttggacgaggtggagagaaacctggatatgaagtccctaaaggtcactagaaggaaaggagatgccaagccaggatacaccaaggaacaacctaaagaagaatccaaacctaaagaagtcccttctgaaggtcgtattgaattgtgcaaaattgacgtttctaaggcctcctcacaagaaattgaagatgcccttcgtcgtcctatagagaccttaattaagcgctcggtcgttcggctgcggcgagcggtatcagctcactcaaaggcggtaatacggttatccacagaatcaggggataacgcaggaaagaacatgtgagcaaaaggccagcaaaaggccaggaaccgtaaaaaggccgcgttgctggcgtttttccataggctccgcccccctgacgagcatcacaaaaatcgacgctcaagtcagaggtggcgaaacccgacaggactataaagataccaggcgtttccccctggaagctccctcgtgcgctctcctgttccgaccctgccgcttaccggatacctgtccgcctttctcccttcgggaagcgtggcgctttctcatagctcacgctgtaggtatctcagttcggtgtaggtcgttcgctccaagctgggctgtgtgcacgaaccccccgttcagcccgaccgctgcgccttatccggtaactatcgtcttgagtccaacccggtaagacacgacttatcgccactggcagcagccactggtaacaggattagcagagcgaggtatgtaggcggtgctacagagttcttgaagtggtggcctaactacggctacactagaagaacagtatttggtatctgcgctctgctgaagccagttaccttcggaaaaagagttggtagctcttgatccggcaaacaaaccaccgctggtagcggtggtttttttgtttgcaagcagcagattacgcgcagaaaaaaaggatctcaagaagatcctttgatcttttctacggggtctgacgctcagtggaacgaaaactcacgttaagggattttggtcatgagattatcaaagacgtcccagccaggacagaaatgcctcgacttcgctgctgcccaaggttgccgggtgacgcacaccgtggaaacggatgaaggcacgaacccagtggacataagcctgttcggttcgtaagctgtaatgcaagtagcgtatgcgctcacgcaactggtccagaaccttgaccgaacgcagcggtggtaacggcgcagtggcggttttcatggcttgttatgactgtttttttggggtacagtctatgcctcgggcatccaagcagcaagcgcgttacgccgtgggtcgatgtttgatgttatggagcagcaacgatgttacgcagcagggcagtcgccctaaaacaaagttaaacatcatgagggaagcggtgatcgccgaagtatcgactcaactatcagaggtagttggcgtcatcgagcgccatctcgaaccgacgttgctggccgtacatttgtacggctccgcagtggatggcggcctgaagccacacagtgatattgatttgctggttacggtgaccgtaaggcttgatgaaacaacgcggcgagctttgatcaacgaccttttggaaacttcggcttcccctggagagagcgagattctccgcgctgtagaagtcaccattgttgtgcacgacgacatcattccgtggcgttatccagctaagcgcgaactgcaatttggagaatggcagcgcaatgacattcttgcaggtatcttcgagccagccacgatcgacattgatctggctatcttgctgacaaaagcaagagaacatagcgttgccttggtaggtccagcggcggaggaactctttgatccggttcctgaacaggatctatttgaggcgctaaatgaaaccttaacgctatggaactcgccgcccgactgggctggtgatgagcgaaatgtagtgcttacgttgtcccgcatttggtacagcgcagtaaccggcaaaatcgcgccgaaggatgtcgctgccgactgggcaatggagcgcctgccggcccagtatcagcccgtcatacttgaagctagacaggcttatcttggacaagaagaagatcgcttggcctcgcgcgcagatcagttggaagaatttgtccactacgtgaaaggcgagatcaccaaggtagtcggcaaataactgtcagaccaagtttactcatatatactttagattgatttaaaacttcatttttaatttaaaaggatctaggtgaagatcctt

SEQ ID NO: 2702 - DNA, 7929 bp, synthetic construct
  misc_feature 1..7929: note = Description of Artificial Sequence: Synthetic polynucleotide
  source 1..7929: mol_type = other DNA
gcgatcgcggtctcagacacttcaaaaccgttttggatcattcctctcttctcggattcagagtagtctaacttgaaagttgaagtgttactccaatacgagaaaggtctattggccagataaacaaccaggggaggaatgtgatccgtgccttcaacaatgtctgtcaaatttctagcatcacaaccaaagaaggttggcttactcgaaagattcaagtttaggaaagtggtggtatcaggtacataagggaacgttgttccatttgcttgagaagaaaactgtctcatgtaggtgttgactaatgatgaaccgtttggccaagagaggtcagtgtctgcactgttgtcaaacgcaaagatgatatcaacgtcacgctccttttgaagtagaggctgcagagggacgttttggttatcctctccaccatcaaccaagtaaagggtgtcattttccgcaatggcacctactcctgcatacgtacttttgtagaaagggttgggggaatagatagcaatgtcgtcttcgtcttcgctaagtccagtcagaaaatgctcaatgatttggtaaattgctcctgaaagatcactcgtattcagttgcagaataaactgattaaacaacgaggatgaagttcccagcacgaaaccagtgttgtcaaatccagcaatgcaaccacgctcatcatctgcgttatttggaacaccattggtaacgttagtaccaagatatgtcaaatcagtaaacccgtacactgaaggcctcgatggcccagatctagggagggcatcattgaggtttccacaaaaggaagaaacatggatccagagacatcaacagagaggaaagcgggtagtgaagccgaagccacaacacagcccgatttggaagggagttcacaatcaaggtgagtccagccattttttttcttttttttttttttattcaggtgaacccacctaactatttttaactgggatccagtgagctcgctgggtgaaagccaaccatcttttgtttcggggaaccgtgctcgccccgtaaagttaatttttttttcccgcgcagctttaatctttcggcagagaaggcgttttcatcgtagcgtgggaacagaataatcagttcatgtgctatacaggcacatggcagcagtcactattttgctttttaaccttaaagtcgttcatcaatcattaactgaccaatcagattttttgcatttgccacttatctaaaaatacttttgtatctcgcagatacgttcagtggtttccaggacaacacccaaaaaaaggtatcaatgccactaggcagtcggttttatttttggtcacccacgcaaagaagcacccacctcttttaggttttaagttgtgggaacagtaacaccgcctagagcttcaggaaaaaccagtacctgtgaccgcaattcaccatgatgcagaatgttaatttaaacgagtgccaaatcaagatttcaacagacaaatcaatcgatccatagttacccattccagccttttcgtcgtcgagcctgcttcattcctgcctcaggtgcataactttgcatgaaaagtccagattagggcagattttgagtttaaaataggaaatataaacaaatataccgcgaaaaaggtttgtttatagcttttcgcctggtgccgtacggtataaatacatactctcctcccccccctggttctctttttcttttgttacttacattttaccgttccgtcactcgcttcactcaacaacaaaaggcgcgccgaaacgatgagatttccttcaatttttactgctgttttattcgcagcatcctccgcattagctgctccagtcaacactacaacagaagatgaaacggcacaaattccggctgaagctgtcatcggttactcagatttagaaggggatttcgatgttgctgttttgccattttccaacagcacaaataacgggttattgtttataaatactactattgccagcattgctgctaaagaagaaggggtatctctcgagaaaagagaggctgaagcaaggtatcgctcatcgcgaaagtgaaacgtgatttcatgcgtcattttgaacattttgtaaatcttatttaataatgtgtgcggcaattcacatttaatttatgaatgttttcttaacatatcgcggcaactcaagaaacggcaggttcggatcttagctactagagattaaggaggtaaaaaaaatgagtgtgatcgctaaacaaatgacctacaaggtttatatgtcaggcacggtcaatggacactactttgaggtcgaaggtgatggaaaaggtaagccctacgagggggagcagacggtaaagctcactgtcaccaagggcggacctctgccatttgcttgggatattttatcaccacagtgtcagtacggaagcataccattcaccaagtaccctgaagatatccctgactatgtaaagcagtcattcccggagggctatacatgggagaggatcatgaactttgaagatggtgcagtgtgtactgtcagcaatgattccagcatccaaggcaactgtttcatctaccatgtcaagttctctggtttgaactttcctcccaatggacctgtcatgcagaagaaaacacagggctgggaacccaacactgagcgtctctttgcacgagatggaatgctgctaggaaacaactttatggctctgaagttagaaggaggcggtcactatttgtgtgaatttaaaactacttacaaggcaaagaagcctgtgaagatgccagggtatcactatgttgaccgcaaactggatgtaaccaatcacaacaaggattacacttcggttgagcagtgtgaaatttccattgcacgcaaacctgtggtcgcctaaggatctctccaaagcccgccgaaaggcgggcttttctgtgcgatgttgctgacagaggtgactacaaagatgacgacgataaagattacaaagacgatgacgataaggactataaagatgatgacgacaaataataacctgcaggagacatgactgttcctcagttcaagttgggcacttacgagaagaccggtcttgctagattctaatcaagaggatgtcagaatgccatttgcctgagagatgcaggcttcatttttgattacttttttatttgtaacctatatagtataggattttttttgtcattttgtttcttctcgtacgagcttgctcctgatcagcctatctcgcagctgatgaatatcttgtggtaggggtttgggaaaatcattcgagtttgatgtttttcttggtatttcccactcctcttcagagtacagaagattaagtgagaggatccttcagtaatgtcttgtttcttttgttgcagtggtgagccattttgacttcgtgaaagtttctttagaatagttgtttccagaggccaaacattccacccgtagtaaagtgcaagcgtaggaagaccaagactggcataaatcaggtataagtgtcgagcactggcaggtgatcttctgaaagtttctactagcagataagatccagtagtcatgcatatggcaacaatgtaccgtgtggatctaagaacgcgtcctactaaccttcgcattcgttggtccagtttgttgttatcgatcaacgtgacaaggttgtcgattccgcgtaagcatgcatacccaaggacgcctgttgcaattccaagtgagccagttccaacaatctttgtaatattagagcacttcattgtgttgcgcttgaaagtaaaatgcgaacaaattaagagataatctcgaaaccgcgacttcaaacgccaatatgatgtgcggcacacaataagcgttcatatccgctgggtgactttctcgctttaaaaaattatccgaaaaaatttttgacggctagctcagtcctaggtacgctagcattaaagaggagaaaatgagccatattcaacgggaaacgtcttgctcgaggccgcgattaaattccaacatggatgctgatttatatgggtataaatgggctcgcgataatgtcgggcaatcaggtgcgacaatctatcgattgtatgggaagcccgatgcgccagagttgtttctgaaacatggcaaaggtagcgttgccaatgatgttacagatgagatggtcagactaaactggctgacggaatttatgcctcttccgaccatcaagcattttatccgtactcctgatgatgcatggttactcaccactgcgatcccagggaaaacagcattccaggtattagaagaatatcctgattcaggtgaaaatattgttgatgcgctggcagtgttcctgcgccggttgcattcgattcctgtttgtaattgtccttttaacagtgatcgcgtatttcgtcttgctcaggcgcaatcacgaatgaataacggtttggttgatgcgagtgattttgatgacgagcgtaatggctggcctgttgaacaagtctggaaagaaatgcataagcttttgccattctcaccggattcagtcgtcactcatggtgatttctcacttgataaccttatttttgacgaggggaaattaataggttgtattgatgttggacgagtcggaatcgcagaccgataccaggatcttgccatcctatggaactgcctcggtgagttttctccttcattacagaaacggctttttcaaaaatatggtattgataatcctgatatgaataaattgcagtttcatttgatgctcgatgagtttttctaacacgtccgacggcggcccacgggtcccaggcctcggagatccgtcccccttttcctttgtcgatatcatgtaattagttatgtcacgcttacattcacgccctccccccacatccgctctaaccgaaaaggaaggagttagacaacctgaagtctaggtccctatttatttttttatagttatgttagtattaagaacgttatttatatttcaaatttttcttttttttctgtacagacgcgtgtacgcatgtaacattatactgaaaaccttgcttgagaaggttttgggacgctcgaaggctttaatttgcaagctgcggccgcacatggcactgtctgggaacctgttccattggtccaagagagggttccaagatcgtcaaatggggtggtgttttggatcacagatctaacgtttacggagtcaagggcctgaaggttggtgacttgtccgtctgtccagacaatgttggttgtaacacctacaccaccgctcttttgatcggtgaaaagactgccaccttggttggtgaagacttaggatacacaggtgaggccttagacatgactgtacctcagttcaagttgggcacttacgagaagactggtcttgctagattctagtttatgttgtatctatgaatatttttttacatggtggatttgttccaatctagttgttagttatttgtcgttatagtcactaatacagttaccatcggaatcttttcatttctttttatacgtacgtatatgtactagatgaagaatgcgacaaggccgaccaacagcaatggtgcttggtaccaaagtttggaaggtgctaccgaattggccgatgatattgaagtggagttgtcattctcctcattggttgctccagtagtggtaaaattaacggggatatcttcggtggaagtgtcaatatcaccgttccaacaataattctcaaaacatcttctacattgctctgtttgtgttgcattggatctctcctgctgtctacgaatgattgcacatccaacacaagtacgccattcttcatcaatagtcatgttcaaacgagacgacaagagaccttaattaagcgctcggtcgttcggctgcggcgagcggtatcagctcactcaaaggcggtaatacggttatccacagaatcaggggataacgcaggaaagaacatgtgagcaaaaggccagcaaaaggccaggaaccgtaaaaaggccgcgttgctggcgtttttccataggctccgcccccctgacgagcatcacaaaaatcgacgctcaagtcagaggtggcgaaacccgacaggactataaagataccaggcgtttccccctggaagctccctcgtgcgctctcctgttccgaccctgccgcttaccggatacctgtccgcctttctcccttcgggaagcgtggcgctttctcatagctcacgctgtaggtatctcagttcggtgtaggtcgttcgctccaagctgggctgtgtgcacgaaccccccgttcagcccgaccgctgcgccttatccggtaactatcgtcttgagtccaacccggtaagacacgacttatcgccactggcagcagccactggtaacaggattagcagagcgaggtatgtaggcggtgctacagagttcttgaagtggtggcctaactacggctacactagaagaacagtatttggtatctgcgctctgctgaagccagttaccttcggaaaaagagttggtagctcttgatccggcaaacaaaccaccgctggtagcggtggtttttttgtttgcaagcagcagattacgcgcagaaaaaaaggatctcaagaagatcctttgatcttttctacggggtctgacgctcagtggaacgaaaactcacgttaagggattttggtcatgagattatcaaagacgtcccagccaggacagaaatgcctcgacttcgctgctgcccaaggttgccgggtgacgcacaccgtggaaacggatgaaggcacgaacccagtggacataagcctgttcggttcgtaagctgtaatgcaagtagcgtatgcgctcacgcaactggtccagaaccttgaccgaacgcagcggtggtaacggcgcagtggcggttttcatggcttgttatgactgtttttttggggtacagtctatgcctcgggcatccaagcagcaagcgcgttacgccgtgggtcgatgtttgatgttatggagcagcaacgatgttacgcagcagggcagtcgccctaaaacaaagttaaacatcatgagggaagcggtgatcgccgaagtatcgactcaactatcagaggtagttggcgtcatcgagcgccatctcgaaccgacgttgctggccgtacatttgtacggctccgcagtggatggcggcctgaagccacacagtgatattgatttgctggttacggtgaccgtaaggcttgatgaaacaacgcggcgagctttgatcaacgaccttttggaaacttcggcttcccctggagagagcgagattctccgcgctgtagaagtcaccattgttgtgcacgacgacatcattccgtggcgttatccagctaagcgcgaactgcaatttggagaatggcagcgcaatgacattcttgcaggtatcttcgagccagccacgatcgacattgatctggctatcttgctgacaaaagcaagagaacatagcgttgccttggtaggtccagcggcggaggaactctttgatccggttcctgaacaggatctatttgaggcgctaaatgaaaccttaacgctatggaactcgccgcccgactgggctggtgatgagcgaaatgtagtgcttacgttgtcccgcatttggtacagcgcagtaaccggcaaaatcgcgccgaaggatgtcgctgccgactgggcaatggagcgcctgccggcccagtatcagcccgtcatacttgaagctagacaggcttatcttggacaagaagaagatcgcttggcctcgcgcgcagatcagttggaagaatttgtccactacgtgaaaggcgagatcaccaaggtagtcggcaaataactgtcagaccaagtttactcatatatactttagattgatttaaaacttcatttttaatttaaaaggatctaggtgaagatcctt

SEQ ID NO: 2703 - DNA, 7620 bp, synthetic construct
  misc_feature 1..7620: note = Description of Artificial Sequence: Synthetic polynucleotide
  source 1..7620: mol_type = other DNA
gcgatcgcggtctcacagatgacagagttgtcaagaacttgaccactttgttgttcgacacagctttgttgacttccggtttcactttggatgagccaacttctttcgctgccagaatcaacggtttgatctccattggtttgaacatcgatgaggaggaagagaaagagccagaacaggctactgaagctccaagtgaagaagctgttgctgagtctgccatggaggaggttgactagttgaatttaggtatatatagtgactgtgatatttagctaatgaaatctaattggatatttagaatgcctcatctcgtagcctatcaattactattaggccatctcttatgggcccttctttgaaattgcattcaaggggggatgggactattttgaatttgaagtttggactctgtgagctgtttggccaattgaagtcatccacttgtacacagggattcaccagtagtttagaacaattctctatcgttattctcttgtcgtctttggcaatacaagcgtcgatgactgagttggtgactttatgaagtctaagttgatatgagtttgaaattatgaaacagttttttacactggacatgtagatagggcccttgatgtttaggaagaggatacagtttgagatgttggagatgtgtgtggagggagcgaccacttttaaaaccacatgatccagacgttgctcagttatcgaagtttcggaaacaaggcctcgatggcccagatctagggagggcatcattgaggtttccacaaaaggaagaaacatggatccagagacatcaacagagaggaaagcgggtagtgaagccgaagccacaacacagcccgatttggaagggagttcacaatcaaggtgagtccagccattttttttcttttttttttttttattcaggtgaacccacctaactatttttaactgggatccagtgagctcgctgggtgaaagccaaccatcttttgtttcggggaaccgtgctcgccccgtaaagttaatttttttttcccgcgcagctttaatctttcggcagagaaggcgttttcatcgtagcgtgggaacagaataatcagttcatgtgctatacaggcacatggcagcagtcactattttgctttttaaccttaaagtcgttcatcaatcattaactgaccaatcagattttttgcatttgccacttatctaaaaatacttttgtatctcgcagatacgttcagtggtttccaggacaacacccaaaaaaaggtatcaatgccactaggcagtcggttttatttttggtcacccacgcaaagaagcacccacctcttttaggttttaagttgtgggaacagtaacaccgcctagagcttcaggaaaaaccagtacctgtgaccgcaattcaccatgatgcagaatgttaatttaaacgagtgccaaatcaagatttcaacagacaaatcaatcgatccatagttacccattccagccttttcgtcgtcgagcctgcttcattcctgcctcaggtgcataactttgcatgaaaagtccagattagggcagattttgagtttaaaataggaaatataaacaaatataccgcgaaaaaggtttgtttatagcttttcgcctggtgccgtacggtataaatacatactctcctcccccccctggttctctttttcttttgttacttacattttaccgttccgtcactcgcttcactcaacaacaaaaggcgcgccgaaacgatgagatttccttcaatttttactgctgttttattcgcagcatcctccgcattagctgctccagtcaacactacaacagaagatgaaacggcacaaattccggctgaagctgtcatcggttactcagatttagaaggggatttcgatgttgctgttttgccattttccaacagcacaaataacgggttattgtttataaatactactattgccagcattgctgctaaagaagaaggggtatctctcgagaaaagagaggctgaagcaaggtatcgctcatcgcgaaagtgaaacgtgatttcatgcgtcattttgaacattttgtaaatcttatttaataatgtgtgcggcaattcacatttaatttatgaatgttttcttaacatatcgcggcaactcaagaaacggcaggttcggatcttagctactagagattaaggaggtaaaaaaaatgagtgtgatcgctaaacaaatgacctacaaggtttatatgtcaggcacggtcaatggacactactttgaggtcgaaggtgatggaaaaggtaagccctacgagggggagcagacggtaaagctcactgtcaccaagggcggacctctgccatttgcttgggatattttatcaccacagtgtcagtacggaagcataccattcaccaagtaccctgaagatatccctgactatgtaaagcagtcattcccggagggctatacatgggagaggatcatgaactttgaagatggtgcagtgtgtactgtcagcaatgattccagcatccaaggcaactgtttcatctaccatgtcaagttctctggtttgaactttcctcccaatggacctgtcatgcagaagaaaacacagggctgggaacccaacactgagcgtctctttgcacgagatggaatgctgctaggaaacaactttatggctctgaagttagaaggaggcggtcactatttgtgtgaatttaaaactacttacaaggcaaagaagcctgtgaagatgccagggtatcactatgttgaccgcaaactggatgtaaccaatcacaacaaggattacacttcggttgagcagtgtgaaatttccattgcacgcaaacctgtggtcgcctaaggatctctccaaagcccgccgaaaggcgggcttttctgtgcgatgttgctgacagaggtgactacaaagatgacgacgataaagattacaaagacgatgacgataaggactataaagatgatgacgacaaataataacctgcaggagacatgactgttcctcagttcaagttgggcacttacgagaagaccggtcttgctagattctaatcaagaggatgtcagaatgccatttgcctgagagatgcaggcttcatttttgattacttttttatttgtaacctatatagtataggattttttttgtcattttgtttcttctcgtacgagcttgctcctgatcagcctatctcgcagctgatgaatatcttgtggtaggggtttgggaaaatcattcgagtttgatgtttttcttggtatttcccactcctcttcagagtacagaagattaagtgagaggatccttcagtaatgtcttgtttcttttgttgcagtggtgagccattttgacttcgtgaaagtttctttagaatagttgtttccagaggccaaacattccacccgtagtaaagtgcaagcgtaggaagaccaagactggcataaatcaggtataagtgtcgagcactggcaggtgatcttctgaaagtttctactagcagataagatccagtagtcatgcatatggcaacaatgtaccgtgtggatctaagaacgcgtcctactaaccttcgcattcgttggtccagtttgttgttatcgatcaacgtgacaaggttgtcgattccgcgtaagcatgcatacccaaggacgcctgttgcaattccaagtgagccagttccaacaatctttgtaatattagagcacttcattgtgttgcgcttgaaagtaaaatgcgaacaaattaagagataatctcgaaaccgcgacttcaaacgccaatatgatgtgcggcacacaataagcgttcatatccgctgggtgactttctcgctttaaaaaattatccgaaaaaatttttgacggctagctcagtcctaggtacgctagcattaaagaggagaaaatgactactcttgatgacacagcctacagatataggacatcagttccgggtgacgcagaggctatcgaagccttggacggttcattcactactgatacggtgtttagagtcaccgctacaggtgatggcttcaccttgagagaggttcctgtagacccacccttaacgaaagttttccctgatgacgaatcggatgacgagtctgatgctggtgaggacggtgaccctgattccagaacatttgtcgcatacggagatgatggtgacctggctggctttgttgtggtgtcctacagcggatggaatcgtagactcacagttgaggacatcgaagttgcacctgaacatcgtggtcacggtgttggtcgtgcactgatgggactggcaacagagtttgctagagaaagaggagccggacatttgtggttagaagtgaccaatgtcaacgctcctgctattcacgcatataggcgaatgggtttcactttgtgcggtcttgatactgctttgtatgacggaactgcttctgatggtgaacaagctctttacatgagtatgccatgtccatagcacgtccgacggcggcccacgggtcccaggcctcggagatccgtcccccttttcctttgtcgatatcatgtaattagttatgtcacgcttacattcacgccctccccccacatccgctctaaccgaaaaggaaggagttagacaacctgaagtctaggtccctatttatttttttatagttatgttagtattaagaacgttatttatatttcaaatttttcttttttttctgtacagacgcgtgtacgcatgtaacattatactgaaaaccttgcttgagaaggttttgggacgctcgaaggctttaatttgcaagctgcggccgcaagaagttgattgagactttcaacgagattgctgaagacaaggaacaattcgagaagttttacagtgctttctccaagaacttgaagttgggtgtccatgaagacagccaaaacagatccgcattggccaagttgctgagatttaactccaccaagtctactgaggagctaacctcattctctgactacgtcaccagaatgccagagcaccagaagaacatctacttcattaccggtgagtctgtcaaggctcttgagaaatctccattcttggatgctttgaaggagaagaactttgaggtcctattgctgaccgatcctattgatgagtacgctatgactcaattgaaagagattgaggacaagaaattggttgacatcactaaagactttgagctggaagagtctgaggaggagaagaaggctagagaggaagaggttaaagatttcgagcctttgactaaagccctgaaagagattttgggtgacaaggttgagaaggttgtagtttcctacaagctggttgactctcctgctgctattagaacttcccaattcggctggtctgctaacatggaaagaattatgaaggctcaagctctgagagacaccaacaccatgtcctcgtacatggcttcaaagaagatcttcgagatctctccaaagtcgccaatcattaaggctttgagaaagaaggttgaggctaccggtacagaagagaccttaattaagcgctcggtcgttcggctgcggcgagcggtatcagctcactcaaaggcggtaatacggttatccacagaatcaggggataacgcaggaaagaacatgtgagcaaaaggccagcaaaaggccaggaaccgtaaaaaggccgcgttgctggcgtttttccataggctccgcccccctgacgagcatcacaaaaatcgacgctcaagtcagaggtggcgaaacccgacaggactataaagataccaggcgtttccccctggaagctccctcgtgcgctctcctgttccgaccctgccgcttaccggatacctgtccgcctttctcccttcgggaagcgtggcgctttctcatagctcacgctgtaggtatctcagttcggtgtaggtcgttcgctccaagctgggctgtgtgcacgaaccccccgttcagcccgaccgctgcgccttatccggtaactatcgtcttgagtccaacccggtaagacacgacttatcgccactggcagcagccactggtaacaggattagcagagcgaggtatgtaggcggtgctacagagttcttgaagtggtggcctaactacggctacactagaagaacagtatttggtatctgcgctctgctgaagccagttaccttcggaaaaagagttggtagctcttgatccggcaaacaaaccaccgctggtagcggtggtttttttgtttgcaagcagcagattacgcgcagaaaaaaaggatctcaagaagatcctttgatcttttctacggggtctgacgctcagtggaacgaaaactcacgttaagggattttggtcatgagattatcaaagacgtcccagccaggacagaaatgcctcgacttcgctgctgcccaaggttgccgggtgacgcacaccgtggaaacggatgaaggcacgaacccagtggacataagcctgttcggttcgtaagctgtaatgcaagtagcgtatgcgctcacgcaactggtccagaaccttgaccgaacgcagcggtggtaacggcgcagtggcggttttcatggcttgttatgactgtttttttggggtacagtctatgcctcgggcatccaagcagcaagcgcgttacgccgtgggtcgatgtttgatgttatggagcagcaacgatgttacgcagcagggcagtcgccctaaaacaaagttaaacatcatgagggaagcggtgatcgccgaagtatcgactcaactatcagaggtagttggcgtcatcgagcgccatctcgaaccgacgttgctggccgtacatttgtacggctccgcagtggatggcggcctgaagccacacagtgatattgatttgctggttacggtgaccgtaaggcttgatgaaacaacgcggcgagctttgatcaacgaccttttggaaacttcggcttcccctggagagagcgagattctccgcgctgtagaagtcaccattgttgtgcacgacgacatcattccgtggcgttatccagctaagcgcgaactgcaatttggagaatggcagcgcaatgacattcttgcaggtatcttcgagccagccacgatcgacattgatctggctatcttgctgacaaaagcaagagaacatagcgttgccttggtaggtccagcggcggaggaactctttgatccggttcctgaacaggatctatttgaggcgctaaatgaaaccttaacgctatggaactcgccgcccgactgggctggtgatgagcgaaatgtagtgcttacgttgtcccgcatttggtacagcgcagtaaccggcaaaatcgcgccgaaggatgtcgctgccgactgggcaatggagcgcctgccggcccagtatcagcccgtcatacttgaagctagacaggcttatcttggacaagaagaagatcgcttggcctcgcgcgcagatcagttggaagaatttgtccactacgtgaaaggcgagatcaccaaggtagtcggcaaataactgtcagaccaagtttactcatatatactttagattgatttaaaacttcatttttaatttaaaaggatctaggtgaagatcctt

SEQ ID NO: 2704 - DNA, 7904 bp, synthetic construct
  misc_feature 1..7904: note = Description of Artificial Sequence: Synthetic polynucleotide
  source 1..7904: mol_type = other DNA
gcgatcgcggtctcatgatatatttgtattttgttcgttaacattgatgttttcttcatttactgttattgtttgtaactttgatcgatttatcttttctactttactgtaatatggctggcgggtgagccttgaactccctgtattactttaccttgctattacttaatctattgactagcagcgacctcttcaaccgaagggcaagtacacagcaagttcatgtctccgtaagtgtcatcaaccctggaaacagtgggccatgtcttttgctccttcaaaaatggcaatgggtaggctgcctcctctcttgtgtatcctctctgggaccactcagcgtcacttgtgctaataatatcttttaggttgtgtggggagttgtgcaagattgcaccatctgtttctccgttttctactttacggatttcttctctaatagagatcatagagtcaatgaatctgtctaattcttctttgtattcggattcagttggttctaccatcaatgtgcccggaatagggaacgacatggtaggagcatggaatccataatcttgcagacgcttggccacatcaatggcctcaattccgaatttcttgaatggtctaagatcaataatgaactcatggccacagtacttgtggcctcgatggcccagatctagggagggcatcattgaggtttccacaaaaggaagaaacatggatccagagacatcaacagagaggaaagcgggtagtgaagccgaagccacaacacagcccgatttggaagggagttcacaatcaaggtgagtccagccattttttttcttttttttttttttattcaggtgaacccacctaactatttttaactgggatccagtgagctcgctgggtgaaagccaaccatcttttgtttcggggaaccgtgctcgccccgtaaagttaatttttttttcccgcgcagctttaatctttcggcagagaaggcgttttcatcgtagcgtgggaacagaataatcagttcatgtgctatacaggcacatggcagcagtcactattttgctttttaaccttaaagtcgttcatcaatcattaactgaccaatcagattttttgcatttgccacttatctaaaaatacttttgtatctcgcagatacgttcagtggtttccaggacaacacccaaaaaaaggtatcaatgccactaggcagtcggttttatttttggtcacccacgcaaagaagcacccacctcttttaggttttaagttgtgggaacagtaacaccgcctagagcttcaggaaaaaccagtacctgtgaccgcaattcaccatgatgcagaatgttaatttaaacgagtgccaaatcaagatttcaacagacaaatcaatcgatccatagttacccattccagccttttcgtcgtcgagcctgcttcattcctgcctcaggtgcataactttgcatgaaaagtccagattagggcagattttgagtttaaaataggaaatataaacaaatataccgcgaaaaaggtttgtttatagcttttcgcctggtgccgtacggtataaatacatactctcctcccccccctggttctctttttcttttgttacttacattttaccgttccgtcactcgcttcactcaacaacaaaaggcgcgccgaaacgatgagatttccttcaatttttactgctgttttattcgcagcatcctccgcattagctgctccagtcaacactacaacagaagatgaaacggcacaaattccggctgaagctgtcatcggttactcagatttagaaggggatttcgatgttgctgttttgccattttccaacagcacaaataacgggttattgtttataaatactactattgccagcattgctgctaaagaagaaggggtatctctcgagaaaagagaggctgaagcaaggtatcgctcatcgcgaaagtgaaacgtgatttcatgcgtcattttgaacattttgtaaatcttatttaataatgtgtgcggcaattcacatttaatttatgaatgttttcttaacatatcgcggcaactcaagaaacggcaggttcggatcttagctactagagattaaggaggtaaaaaaaatgagtgtgatcgctaaacaaatgacctacaaggtttatatgtcaggcacggtcaatggacactactttgaggtcgaaggtgatggaaaaggtaagccctacgagggggagcagacggtaaagctcactgtcaccaagggcggacctctgccatttgcttgggatattttatcaccacagtgtcagtacggaagcataccattcaccaagtaccctgaagatatccctgactatgtaaagcagtcattcccggagggctatacatgggagaggatcatgaactttgaagatggtgcagtgtgtactgtcagcaatgattccagcatccaaggcaactgtttcatctaccatgtcaagttctctggtttgaactttcctcccaatggacctgtcatgcagaagaaaacacagggctgggaacccaacactgagcgtctctttgcacgagatggaatgctgctaggaaacaactttatggctctgaagttagaaggaggcggtcactatttgtgtgaatttaaaactacttacaaggcaaagaagcctgtgaagatgccagggtatcactatgttgaccgcaaactggatgtaaccaatcacaacaaggattacacttcggttgagcagtgtgaaatttccattgcacgcaaacctgtggtcgcctaaggatctctccaaagcccgccgaaaggcgggcttttctgtgcgatgttgctgacagaggtgactacaaagatgacgacgataaagattacaaagacgatgacgataaggactataaagatgatgacgacaaataataacctgcaggagacatgactgttcctcagttcaagttgggcacttacgagaagaccggtcttgctagattctaatcaagaggatgtcagaatgccatttgcctgagagatgcaggcttcatttttgattacttttttatttgtaacctatatagtataggattttttttgtcattttgtttcttctcgtacgagcttgctcctgatcagcctatctcgcagctgatgaatatcttgtggtaggggtttgggaaaatcattcgagtttgatgtttttcttggtatttcccactcctcttcagagtacagaagattaagtgagaggatccttcagtaatgtcttgtttcttttgttgcagtggtgagccattttgacttcgtgaaagtttctttagaatagttgtttccagaggccaaacattccacccgtagtaaagtgcaagcgtaggaagaccaagactggcataaatcaggtataagtgtcgagcactggcaggtgatcttctgaaagtttctactagcagataagatccagtagtcatgcatatggcaacaatgtaccgtgtggatctaagaacgcgtcctactaaccttcgcattcgttggtccagtttgttgttatcgatcaacgtgacaaggttgtcgattccgcgtaagcatgcatacccaaggacgcctgttgcaattccaagtgagccagttccaacaatctttgtaatattagagcacttcattgtgttgcgcttgaaagtaaaatgcgaacaaattaagagataatctcgaaaccgcgacttcaaacgccaatatgatgtgcggcacacaataagcgttcatatccgctgggtgactttctcgctttaaaaaattatccgaaaaaatttttgacggctagctcagtcctaggtacgctagcattaaagaggagaaaatgaaaaagccagagctgacagccacctctgtagaaaagtttttgattgagaaattcgactcagttagcgatctgatgcagttgtcggaaggtgaggaatcccgtgcattttccttcgatgttggtggacgtggttatgtccttcgtgttaattcctgcgccgacggtttctacaaagacagatacgtgtacaggcacttcgcttccgctgctttgccaattcctgaggtccttgatattggagaattttccgagtctttgacatattgtatttctaggcgagcacaaggtgttactctacaagatttgcctgaaacagaattgcccgcagtactacagccagtggccgaagctatggacgcaatagcagccgctgacttgagtcagacgagtggttttggtccatttggaccccaaggtatcggtcaatacactacttggagagacttcatctgtgcaattgctgatccgcatgtgtatcattggcaaacggttatggatgacactgtatctgcatccgttgctcaggctttggatgagctgatgctttgggccgaagattgtcctgaagtcagacacctggtacacgctgatttcggctcaaataatgtgttgaccgacaacggtaggatcacagcagtgatcgactggtcagaggcaatgtttggagattcacaatacgaggtggctaacatctttttctggcgtccttggctcgcatgcatggaacaacaaactcgttatttcgagagaaggcatccagagttagctggttctcctagacttagagcctacatgctgagaattggattagatcagttgtatcaaagcttagttgatggcaattttgatgacgctgcttgggctcaaggaagatgtgacgctatcgtcagaagtggtgcaggcactgtcggtagaacacaaatagcaagacgtagcgctgctgtttggactgacggatgtgttgaggttttagccgacagtggtaacaggcgtccatccacaagaccaagagctaaggaataacacgtccgacggcggcccacgggtcccaggcctcggagatccgtcccccttttcctttgtcgatatcatgtaattagttatgtcacgcttacattcacgccctccccccacatccgctctaaccgaaaaggaaggagttagacaacctgaagtctaggtccctatttatttttttatagttatgttagtattaagaacgttatttatatttcaaatttttcttttttttctgtacagacgcgtgtacgcatgtaacattatactgaaaaccttgcttgagaaggttttgggacgctcgaaggctttaatttgcaagctgcggccgcggtgtcatcaaggctggtatggtcgtcactttcgccccagctggtgtcactaccgaagtcaagtcggtcgagatgcaccacgagcaattggagcaaggtgtcccaggtgacaacgttggattcaacgtcaagaacgtttccgtcaaggaaatcagaagaggtaacgtctgtggtgactccaagaacgacccaccaaaggccgctgaatctttcaacgcccaggtcattatcttgaaccacccaggtcaaatctctgctggttacgctccagttttggactgtcacaccgctcacattgcttgtaagttcgacgagttgattgagaagattgacagaagaaccggtaagaagactgaggagaaccctaagttcatcaagtccggtgacgccgctatcgtcaagttggtcccatctaagccaatgtgtgttgaggccttcactgactacccacctttaggaagattcgctgtcagagacatgagacaaactgttgctgtcggtgttatcaagtccgttgtcaagactgacaaggctggtaaggtcaccaaggctgctcaaaaggccgctaagaaatagattgcttgaagctttaatttattttattaacataataataatacaagcatgatagagaccttaattaagcgctcggtcgttcggctgcggcgagcggtatcagctcactcaaaggcggtaatacggttatccacagaatcaggggataacgcaggaaagaacatgtgagcaaaaggccagcaaaaggccaggaaccgtaaaaaggccgcgttgctggcgtttttccataggctccgcccccctgacgagcatcacaaaaatcgacgctcaagtcagaggtggcgaaacccgacaggactataaagataccaggcgtttccccctggaagctccctcgtgcgctctcctgttccgaccctgccgcttaccggatacctgtccgcctttctcccttcgggaagcgtggcgctttctcatagctcacgctgtaggtatctcagttcggtgtaggtcgttcgctccaagctgggctgtgtgcacgaaccccccgttcagcccgaccgctgcgccttatccggtaactatcgtcttgagtccaacccggtaagacacgacttatcgccactggcagcagccactggtaacaggattagcagagcgaggtatgtaggcggtgctacagagttcttgaagtggtggcctaactacggctacactagaagaacagtatttggtatctgcgctctgctgaagccagttaccttcggaaaaagagttggtagctcttgatccggcaaacaaaccaccgctggtagcggtggtttttttgtttgcaagcagcagattacgcgcagaaaaaaaggatctcaagaagatcctttgatcttttctacggggtctgacgctcagtggaacgaaaactcacgttaagggattttggtcatgagattatcaaagacgtcccagccaggacagaaatgcctcgacttcgctgctgcccaaggttgccgggtgacgcacaccgtggaaacggatgaaggcacgaacccagtggacataagcctgttcggttcgtaagctgtaatgcaagtagcgtatgcgctcacgcaactggtccagaaccttgaccgaacgcagcggtggtaacggcgcagtggcggttttcatggcttgttatgactgtttttttggggtacagtctatgcctcgggcatccaagcagcaagcgcgttacgccgtgggtcgatgtttgatgttatggagcagcaacgatgttacgcagcagggcagtcgccctaaaacaaagttaaacatcatgagggaagcggtgatcgccgaagtatcgactcaactatcagaggtagttggcgtcatcgagcgccatctcgaaccgacgttgctggccgtacatttgtacggctccgcagtggatggcggcctgaagccacacagtgatattgatttgctggttacggtgaccgtaaggcttgatgaaacaacgcggcgagctttgatcaacgaccttttggaaacttcggcttcccctggagagagcgagattctccgcgctgtagaagtcaccattgttgtgcacgacgacatcattccgtggcgttatccagctaagcgcgaactgcaatttggagaatggcagcgcaatgacattcttgcaggtatcttcgagccagccacgatcgacattgatctggctatcttgctgacaaaagcaagagaacatagcgttgccttggtaggtccagcggcggaggaactctttgatccggttcctgaacaggatctatttgaggcgctaaatgaaaccttaacgctatggaactcgccgcccgactgggctggtgatgagcgaaatgtagtgcttacgttgtcccgcatttggtacagcgcagtaaccggcaaaatcgcgccgaaggatgtcgctgccgactgggcaatggagcgcctgccggcccagtatcagcccgtcatacttgaagctagacaggcttatcttggacaagaagaagatcgcttggcctcgcgcgcagatcagttggaagaatttgtccactacgtgaaaggcgagatcaccaaggtagtcggcaaataactgtcagaccaagtttactcatatatactttagattgatttaaaacttcatttttaatttaaaaggatctaggtgaagatcctt

SEQ ID NO: 2705 - DNA, 6316 bp, synthetic construct
  misc_feature 1..6316: note = Description of Artificial Sequence: Synthetic polynucleotide
  source 1..6316: mol_type = other DNA
gcgatcgcggtctcacgttaggtcagtgatgacaatggaccaaattgttgcaaggtttttctttttctttcatcggcacatttcagcctcacatgcgactattatcgatcaatgaaatccatcaagattgaaatcttaaaattgcccctttcacttgacaggatccttttttgtagaaatgtcttggtgtcctcgtccaatcaggtagccatctctgaaatatctggctccgttgcaactccgaacgacctgctggcaacgtaaaattctccggggtaaaacttaaatgtggagtaatggaaccagaaacgtctattcccttctctctccttccaccgcccgttaccgtccctaggaaattttactctgctggagagcttcttctacggcccccttgcagcaatgctcttcccagcattacgttgcgggtaaaacggaggtcgtgtacccgacctagcagcccagggatggaaaagtcccggccgtcgctggcaataatagcgggcggacgcatgtcatgagattattggaaaccaccagaatcgaatataaaaggcgaacacctttcccaattttggtttctcctgacccaaagactttaaatttaatttatttgtccctatttcaatcaattgaacaactatcaggcgcgccgaaacgatgagatttccttcaatttttactgctgttttattcgcagcatcctccgcattagctgctccagtcaacactacaacagaagatgaaacggcacaaattccggctgaagctgtcatcggttactcagatttagaaggggatttcgatgttgctgttttgccattttccaacagcacaaataacgggttattgtttataaatactactattgccagcattgctgctaaagaagaaggggtatctctcgagaaaagagaggctgaagcaggtagagacggaaagtgaaacgtgatttcatgcgtcattttgaacattttgtaaatcttatttaataatgtgtgcggcaattcacatttaatttatgaatgttttcttaacatatcgcggcaactcaagaaacggcaggttcggatcttagctactagagattaaggaggtaaaaaaaatgagtgtgatcgctaaacaaatgacctacaaggtttatatgtcaggcacggtcaatggacactactttgaggtcgaaggtgatggaaaaggtaagccctacgagggggagcagacggtaaagctcactgtcaccaagggcggacctctgccatttgcttgggatattttatcaccacagtgtcagtacggaagcataccattcaccaagtaccctgaagatatccctgactatgtaaagcagtcattcccggagggctatacatgggagaggatcatgaactttgaagatggtgcagtgtgtactgtcagcaatgattccagcatccaaggcaactgtttcatctaccatgtcaagttctctggtttgaactttcctcccaatggacctgtcatgcagaagaaaacacagggctgggaacccaacactgagcgtctgtttgcacgagatggaatgctgctaggaaacaactttatggctctgaagttagaaggaggcggtcactatttgtgtgaatttaaaactacttacaaggcaaagaagcctgtgaagatgccagggtatcactatgttgaccgcaaactggatgtaaccaatcacaacaaggattacacttcggttgagcagtgtgaaatttccattgcacgcaaacctgtggtcgcctaaggatctctccaaagcccgccgaaaggcgggcttttctgtcgtctcaaggtgactacaaagatgacgacgataaagattacaaagacgatgacgataaggactataaagatgatgacgacaaataataacctgcaggagacatgactgttcctcagttcaagttgggcacttacgagaagaccggtcttgctagattctaatcaagaggatgtcagaatgccatttgcctgagagatgcaggcttcatttttgattacttttttatttgtaacctatatagtataggattttttttgtcattttgtttcttctcgtacgagcttgctcctgatcagcctatctcgcagctgatgaatatcttgtggtaggggtttgggaaaatcattcgagtttgatgtttttcttggtatttcccactcctcttcagagtacagaagattaagtgagaggatccttcagtaatgtcttgtttcttttgttgcagtggtgagccattttgacttcgtgaaagtttctttagaatagttgtttccagaggccaaacattccacccgtagtaaagtgcaagcgtaggaagaccaagactggcataaatcaggtataagtgtcgagcactggcaggtgatcttctgaaagtttctactagcagataagatccagtagtcatgcatatggcaacaatgtaccgtgtggatctaagaacgcgtcctactaaccttcgcattcgttggtccagtttgttgttatcgatcaacgtgacaaggttgtcgattccgcgtaagcatgcatacccaaggacgcctgttgcaattccaagtgagccagttccaacaatctttgtaatattagagcacttcattgtgttgcgcttgaaagtaaaatgcgaacaaattaagagataatctcgaaaccgcgacttcaaacgccaatatgatgtgcggcacacaataagcgttcatatccgctgggtgactttctcgctttaaaaaattatccgaaaaaatttttgacggctagctcagtcctaggtacgctagcattaaagaggagaaaatgactactcttgatgacacagcctacagatataggacatcagttccgggtgacgcagaggctatcgaagccttggacggttcattcactactgatacggtgtttagagtcaccgctacaggtgatggcttcaccttgagagaggttcctgtagacccacccttaacgaaagttttccctgatgacgaatcggatgacgagtctgatgctggtgaggacggtgaccctgattccagaacatttgtcgcatacggagatgatggtgacctggctggctttgttgtggtgtcctacagcggatggaatcgtagactcacagttgaggacatcgaagttgcacctgaacatcgtggtcacggtgttggtcgtgcactgatgggactggcaacagagtttgctagagaaagaggagccggacatttgtggttagaagtgaccaatgtcaacgctcctgctattcacgcatataggcgaatgggtttcactttgtgcggtcttgatactgctttgtatgacggaactgcttctgatggtgaacaagctctttacatgagtatgccatgtccatagcacgtccgacggcggcccacgggtcccaggcctcggagatccgtcccccttttcctttgtcgatatcatgtaattagttatgtcacgcttacattcacgccctccccccacatccgctctaaccgaaaaggaaggagttagacaacctgaagtctaggtccctatttatttttttatagttatgttagtattaagaacgttatttatatttcaaatttttcttttttttctgtacagacgcgtgtacgcatgtaacattatactgaaaaccttgcttgagaaggttttgggacgctcgaaggctttaatttgcaagctgcggccgcactcaatcccgactgtcaatcattcatccttgcgtcttttgaacatctatgcttccacaagtcaattcttgatttagtatacacataaccaaatttggatcaagtttgaagtaaaactttaacttcagctccttacatttgcactaagatctctgctactctggtcccaagtgaaccaccttttggaccctattgaccggaccttaacttgccaaacctaaacgcttaatgcctcagacgttttaatgcctctcaacacctccaaggttgctttcttgagcatgcctactaggaactttaacgaactgtggggttgcagacagtttcaggcgtgtcccgaccaatatggcctactagactctctgaaaaatcacagttttccagtagttccgatcaaattaccatcgaaatggtcccataaacggacatttgacatccgttcctgaattatagtcttccaccgtggatcatggtgttcctttttttcccaaagaatatcagcatcccttaactacgttagagaccttaattaagcgctcggtcgttcggctgcggcgagcggtatcagctcactcaaaggcggtaatacggttatccacagaatcaggggataacgcaggaaagaacatgtgagcaaaaggccagcaaaaggccaggaaccgtaaaaaggccgcgttgctggcgtttttccataggctccgcccccctgacgagcatcacaaaaatcgacgctcaagtcagaggtggcgaaacccgacaggactataaagataccaggcgtttccccctggaagctccctcgtgcgctctcctgttccgaccctgccgcttaccggatacctgtccgcctttctcccttcgggaagcgtggcgctttctcatagctcacgctgtaggtatctcagttcggtgtaggtcgttcgctccaagctgggctgtgtgcacgaaccccccgttcagcccgaccgctgcgccttatccggtaactatcgtcttgagtccaacccggtaagacacgacttatcgccactggcagcagccactggtaacaggattagcagagcgaggtatgtaggcggtgctacagagttcttgaagtggtggcctaactacggctacactagaagaacagtatttggtatctgcgctctgctgaagccagttaccttcggaaaaagagttggtagctcttgatccggcaaacaaaccaccgctggtagcggtggtttttttgtttgcaagcagcagattacgcgcagaaaaaaaggatctcaagaagatcctttgatcttttctacggggtctgacgctcagtggaacgaaaactcacgttaagggattttggtcatgagattatcaaagacgtcccagccaggacagaaatgcctcgacttcgctgctgcccaaggttgccgggtgacgcacaccgtggaaacggatgaaggcacgaacccagtggacataagcctgttcggttcgtaagctgtaatgcaagtagcgtatgcgctcacgcaactggtccagaaccttgaccgaacgcagcggtggtaacggcgcagtggcggttttcatggcttgttatgactgtttttttggggtacagtctatgcctcgggcatccaagcagcaagcgcgttacgccgtgggtcgatgtttgatgttatggagcagcaacgatgttacgcagcagggcagtcgccctaaaacaaagttaaacatcatgagggaagcggtgatcgccgaagtatcgactcaactatcagaggtagttggcgtcatcgagcgccatctcgaaccgacgttgctggccgtacatttgtacggctccgcagtggatggcggcctgaagccacacagtgatattgatttgctggttacggtgaccgtaaggcttgatgaaacaacgcggcgagctttgatcaacgaccttttggaaacttcggcttcccctggagagagcgagattctccgcgctgtagaagtcaccattgttgtgcacgacgacatcattccgtggcgttatccagctaagcgcgaactgcaatttggagaatggcagcgcaatgacattcttgcaggtatcttcgagccagccacgatcgacattgatctggctatcttgctgacaaaagcaagagaacatagcgttgccttggtaggtccagcggcggaggaactctttgatccggttcctgaacaggatctatttgaggcgctaaatgaaaccttaacgctatggaactcgccgcccgactgggctggtgatgagcgaaatgtagtgcttacgttgtcccgcatttggtacagcgcagtaaccggcaaaatcgcgccgaaggatgtcgctgccgactgggcaatggagcgcctgccggcccagtatcagcccgtcatacttgaagctagacaggcttatcttggacaagaagaagatcgcttggcctcgcgcgcagatcagttggaagaatttgtccactacgtgaaaggcgagatcaccaaggtagtcggcaaataactgtcagaccaagtttactcatatatactttagattgatttaaaacttcatttttaatttaaaaggatctaggtgaagatcctt

SEQ ID NO: 2706 - DNA, 7083 bp, synthetic construct
  misc_feature 1..7083: note = Description of Artificial Sequence: Synthetic polynucleotide
  source 1..7083: mol_type = other DNA
gcgatcgcggtctcacagatgacagagttgtcaagaacttgaccactttgttgttcgacacagctttgttgacttccggtttcactttggatgagccaacttctttcgctgccagaatcaacggtttgatctccattggtttgaacatcgatgaggaggaagagaaagagccagaacaggctactgaagctccaagtgaagaagctgttgctgagtctgccatggaggaggttgactagttgaatttaggtatatatagtgactgtgatatttagctaatgaaatctaattggatatttagaatgcctcatctcgtagcctatcaattactattaggccatctcttatgggcccttctttgaaattgcattcaaggggggatgggactattttgaatttgaagtttggactctgtgagctgtttggccaattgaagtcatccacttgtacacagggattcaccagtagtttagaacaattctctatcgttattctcttgtcgtctttggcaatacaagcgtcgatgactgagttggtgactttatgaagtctaagttgatatgagtttgaaattatgaaacagttttttacactggacatgtagatagggcccttgatgtttaggaagaggatacagtttgagatgttggagatgtgtgtggagggagcgaccacttttaaaaccacatgatccagacgttgctcagttatcgaagtttcggaaacaacctcagcttttttgtagaaatgtcttggtgtcctcgtccaatcaggtagccatctctgaaatatctggctccgttgcaactccgaacgacctgctggcaacgtaaaattctccggggtaaaacttaaatgtggagtaatggaaccagaaacgtctattcccttctctctccttccaccgcccgttaccgtccctaggaaattttactctgctggagagcttcttctacggcccccttgcagcaatgctcttcccagcattacgttgcgggtaaaacggaggtcgtgtacccgacctagcagcccagggatggaaaagtcccggccgtcgctggcaataatagcgggcggacgcatgtcatgagattattggaaaccaccagaatcgaatataaaaggcgaacacctttcccaattttggtttctcctgacccaaagactttaaatttaatttatttgtccctatttcaatcaattgaacaactatcaggcgcgccgaaacgatgagatttccttcaatttttactgctgttttattcgcagcatcctccgcattagctgctccagtcaacactacaacagaagatgaaacggcacaaattccggctgaagctgtcatcggttactcagatttagaaggggatttcgatgttgctgttttgccattttccaacagcacaaataacgggttattgtttataaatactactattgccagcattgctgctaaagaagaaggggtatctctcgagaaaagagaggctgaagcaggtagagacggaaagtgaaacgtgatttcatgcgtcattttgaacattttgtaaatcttatttaataatgtgtgcggcaattcacatttaatttatgaatgttttcttaacatatcgcggcaactcaagaaacggcaggttcggatcttagctactagagattaaggaggtaaaaaaaatgagtgtgatcgctaaacaaatgacctacaaggtttatatgtcaggcacggtcaatggacactactttgaggtcgaaggtgatggaaaaggtaagccctacgagggggagcagacggtaaagctcactgtcaccaagggcggacctctgccatttgcttgggatattttatcaccacagtgtcagtacggaagcataccattcaccaagtaccctgaagatatccctgactatgtaaagcagtcattcccggagggctatacatgggagaggatcatgaactttgaagatggtgcagtgtgtactgtcagcaatgattccagcatccaaggcaactgtttcatctaccatgtcaagttctctggtttgaactttcctcccaatggacctgtcatgcagaagaaaacacagggctgggaacccaacactgagcgtctgtttgcacgagatggaatgctgctaggaaacaactttatggctctgaagttagaaggaggcggtcactatttgtgtgaatttaaaactacttacaaggcaaagaagcctgtgaagatgccagggtatcactatgttgaccgcaaactggatgtaaccaatcacaacaaggattacacttcggttgagcagtgtgaaatttccattgcacgcaaacctgtggtcgcctaaggatctctccaaagcccgccgaaaggcgggcttttctgtcgtctcaaggtgactacaaagatgacgacgataaagattacaaagacgatgacgataaggactataaagatgatgacgacaaataataacctgcaggagacatgactgttcctcagttcaagttgggcacttacgagaagaccggtcttgctagattctaatcaagaggatgtcagaatgccatttgcctgagagatgcaggcttcatttttgattacttttttatttgtaacctatatagtataggattttttttgtcattttgtttcttctcgtacgagcttgctcctgatcagcctatctcgcagctgatgaatatcttgtggtaggggtttgggaaaatcattcgagtttgatgtttttcttggtatttcccactcctcttcagagtacagaagattaagtgagaggatccttcagtaatgtcttgtttcttttgttgcagtggtgagccattttgacttcgtgaaagtttctttagaatagttgtttccagaggccaaacattccacccgtagtaaagtgcaagcgtaggaagaccaagactggcataaatcaggtataagtgtcgagcactggcaggtgatcttctgaaagtttctactagcagataagatccagtagtcatgcatatggcaacaatgtaccgtgtggatctaagaacgcgtcctactaaccttcgcattcgttggtccagtttgttgttatcgatcaacgtgacaaggttgtcgattccgcgtaagcatgcatacccaaggacgcctgttgcaattccaagtgagccagttccaacaatctttgtaatattagagcacttcattgtgttgcgcttgaaagtaaaatgcgaacaaattaagagataatctcgaaaccgcgacttcaaacgccaatatgatgtgcggcacacaataagcgttcatatccgctgggtgactttctcgctttaaaaaattatccgaaaaaatttttgacggctagctcagtcctaggtacgctagcattaaagaggagaaaatgactactcttgatgacacagcctacagatataggacatcagttccgggtgacgcagaggctatcgaagccttggacggttcattcactactgatacggtgtttagagtcaccgctacaggtgatggcttcaccttgagagaggttcctgtagacccacccttaacgaaagttttccctgatgacgaatcggatgacgagtctgatgctggtgaggacggtgaccctgattccagaacatttgtcgcatacggagatgatggtgacctggctggctttgttgtggtgtcctacagcggatggaatcgtagactcacagttgaggacatcgaagttgcacctgaacatcgtggtcacggtgttggtcgtgcactgatgggactggcaacagagtttgctagagaaagaggagccggacatttgtggttagaagtgaccaatgtcaacgctcctgctattcacgcatataggcgaatgggtttcactttgtgcggtcttgatactgctttgtatgacggaactgcttctgatggtgaacaagctctttacatgagtatgccatgtccatagcacgtccgacggcggcccacgggtcccaggcctcggagatccgtcccccttttcctttgtcgatatcatgtaattagttatgtcacgcttacattcacgccctccccccacatccgctctaaccgaaaaggaaggagttagacaacctgaagtctaggtccctatttatttttttatagttatgttagtattaagaacgttatttatatttcaaatttttcttttttttctgtacagacgcgtgtacgcatgtaacattatactgaaaaccttgcttgagaaggttttgggacgctcgaaggctttaatttgcaagctgcggccgcaagaagttgattgagactttcaacgagattgctgaagacaaggaacaattcgagaagttttacagtgctttctccaagaacttgaagttgggtgtccatgaagacagccaaaacagatccgcattggccaagttgctgagatttaactccaccaagtctactgaggagctaacctcattctctgactacgtcaccagaatgccagagcaccagaagaacatctacttcattaccggtgagtctgtcaaggctcttgagaaatctccattcttggatgctttgaaggagaagaactttgaggtcctattgctgaccgatcctattgatgagtacgctatgactcaattgaaagagattgaggacaagaaattggttgacatcactaaagactttgagctggaagagtctgaggaggagaagaaggctagagaggaagaggttaaagatttcgagcctttgactaaagccctgaaagagattttgggtgacaaggttgagaaggttgtagtttcctacaagctggttgactctcctgctgctattagaacttcccaattcggctggtctgctaacatggaaagaattatgaaggctcaagctctgagagacaccaacaccatgtcctcgtacatggcttcaaagaagatcttcgagatctctccaaagtcgccaatcattaaggctttgagaaagaaggttgaggctaccggtacagaagagaccttaattaagcgctcggtcgttcggctgcggcgagcggtatcagctcactcaaaggcggtaatacggttatccacagaatcaggggataacgcaggaaagaacatgtgagcaaaaggccagcaaaaggccaggaaccgtaaaaaggccgcgttgctggcgtttttccataggctccgcccccctgacgagcatcacaaaaatcgacgctcaagtcagaggtggcgaaacccgacaggactataaagataccaggcgtttccccctggaagctccctcgtgcgctctcctgttccgaccctgccgcttaccggatacctgtccgcctttctcccttcgggaagcgtggcgctttctcatagctcacgctgtaggtatctcagttcggtgtaggtcgttcgctccaagctgggctgtgtgcacgaaccccccgttcagcccgaccgctgcgccttatccggtaactatcgtcttgagtccaacccggtaagacacgacttatcgccactggcagcagccactggtaacaggattagcagagcgaggtatgtaggcggtgctacagagttcttgaagtggtggcctaactacggctacactagaagaacagtatttggtatctgcgctctgctgaagccagttaccttcggaaaaagagttggtagctcttgatccggcaaacaaaccaccgctggtagcggtggtttttttgtttgcaagcagcagattacgcgcagaaaaaaaggatctcaagaagatcctttgatcttttctacggggtctgacgctcagtggaacgaaaactcacgttaagggattttggtcatgagattatcaaagacgtcccagccaggacagaaatgcctcgacttcgctgctgcccaaggttgccgggtgacgcacaccgtggaaacggatgaaggcacgaacccagtggacataagcctgttcggttcgtaagctgtaatgcaagtagcgtatgcgctcacgcaactggtccagaaccttgaccgaacgcagcggtggtaacggcgcagtggcggttttcatggcttgttatgactgtttttttggggtacagtctatgcctcgggcatccaagcagcaagcgcgttacgccgtgggtcgatgtttgatgttatggagcagcaacgatgttacgcagcagggcagtcgccctaaaacaaagttaaacatcatgagggaagcggtgatcgccgaagtatcgactcaactatcagaggtagttggcgtcatcgagcgccatctcgaaccgacgttgctggccgtacatttgtacggctccgcagtggatggcggcctgaagccacacagtgatattgatttgctggttacggtgaccgtaaggcttgatgaaacaacgcggcgagctttgatcaacgaccttttggaaacttcggcttcccctggagagagcgagattctccgcgctgtagaagtcaccattgttgtgcacgacgacatcattccgtggcgttatccagctaagcgcgaactgcaatttggagaatggcagcgcaatgacattcttgcaggtatcttcgagccagccacgatcgacattgatctggctatcttgctgacaaaagcaagagaacatagcgttgccttggtaggtccagcggcggaggaactctttgatccggttcctgaacaggatctatttgaggcgctaaatgaaaccttaacgctatggaactcgccgcccgactgggctggtgatgagcgaaatgtagtgcttacgttgtcccgcatttggtacagcgcagtaaccggcaaaatcgcgccgaaggatgtcgctgccgactgggcaatggagcgcctgccggcccagtatcagcccgtcatacttgaagctagacaggcttatcttggacaagaagaagatcgcttggcctcgcgcgcagatcagttggaagaatttgtccactacgtgaaaggcgagatcaccaaggtagtcggcaaataactgtcagaccaagtttactcatatatactttagattgatttaaaacttcatttttaatttaaaaggatctaggtgaagatcctt

SEQ ID NO: 2707 - DNA, 6374 bp, synthetic construct
  misc_feature 1..6374: note = Description of Artificial Sequence: Synthetic polynucleotide
  source 1..6374: mol_type = other DNA
gcgatcgcggtctcacgttaggtcagtgatgacaatggaccaaattgttgcaaggtttttctttttctttcatcggcacatttcagcctcacatgcgactattatcgatcaatgaaatccatcaagattgaaatcttaaaattgcccctttcacttgacaggatccttttttgtagaaatgtcttggtgtcctcgtccaatcaggtagccatctctgaaatatctggctccgttgcaactccgaacgacctgctggcaacgtaaaattctccggggtaaaacttaaatgtggagtaatggaaccagaaacgtctattcccttctctctccttccaccgcccgttaccgtccctaggaaattttactctgctggagagcttcttctacggcccccttgcagcaatgctcttcccagcattacgttgcgggtaaaacggaggtcgtgtacccgacctagcagcccagggatggaaaagtcccggccgtcgctggcaataatagcgggcggacgcatgtcatgagattattggaaaccaccagaatcgaatataaaaggcgaacacctttcccaattttggtttctcctgacccaaagactttaaatttaatttatttgtccctatttcaatcaattgaacaactatcaggcgcgccgaaacgatgagatttccttcaatttttactgctgttttattcgcagcatcctccgcattagctgctccagtcaacactacaacagaagatgaaacggcacaaattccggctgaagctgtcatcggttactcagatttagaaggggatttcgatgttgctgttttgccattttccaacagcacaaataacgggttattgtttataaatactactattgccagcattgctgctaaagaagaaggggtatctctcgagaaaagagaggctgaagcaggtagagacggaaagtgaaacgtgatttcatgcgtcattttgaacattttgtaaatcttatttaataatgtgtgcggcaattcacatttaatttatgaatgttttcttaacatatcgcggcaactcaagaaacggcaggttcggatcttagctactagaccttaggaggtaaacatatgtcgtctggtgccaaattgtttgaaaatgaaatcccgtatgtcactgaactcgagggcgacgtcaatggtatgaagtttaccattcatggtaaaggtaccggcgatgcgagcgttggtaccattaaagcgcagttcatctgcactacgggcgacctgccggtcccgtgggcaaccctggtgagcaccctgagctacggtgttcagtgtttcgccaagtacccgccgcacatcaaggatttctacaagagctgcatgccggaaggttatgttcaagagcgtaccatcaccttcgaaggcgacggcgtgtttaagacgcgtgctgaggttacctttgaaaacggttctgtctacaatcgtgtcaaactgactggccagggttttaagaaagacggtcacattctgcgtaagaacgttgcattccaatgcccgccaagcattctgtatattctgcctgacaccgttaacaatggcatccgcgttgagttcaaccaggcgtacgatattgaaggtgtgaccgaaaaactggttaccaaatgcagccaaatgaatcgtccgttggcgggctccgcggcagtgcatatcccgcgttatcatcacctgagcaaacacaccaaactgagcaaagaccgcgacgagcgccgtgatcacatgtgtctggtagaggtcgtgaaagcggttgatctggacacgtatcagtaaggatctctccaaagcccgccgaaaggcgggcttttctgtcgtctcaaggtgactacaaagatgacgacgataaagattacaaagacgatgacgataaggactataaagatgatgacgacaaataataacctgcaggagacatgactgttcctcagttcaagttgggcacttacgagaagaccggtcttgctagattctaatcaagaggatgtcagaatgccatttgcctgagagatgcaggcttcatttttgattacttttttatttgtaacctatatagtataggattttttttgtcattttgtttcttctcgtacgagcttgctcctgatcagcctatctcgcagctgatgaatatcttgtggtaggggtttgggaaaatcattcgagtttgatgtttttcttggtatttcccactcctcttcagagtacagaagattaagtgagaggatccttcagtaatgtcttgtttcttttgttgcagtggtgagccattttgacttcgtgaaagtttctttagaatagttgtttccagaggccaaacattccacccgtagtaaagtgcaagcgtaggaagaccaagactggcataaatcaggtataagtgtcgagcactggcaggtgatcttctgaaagtttctactagcagataagatccagtagtcatgcatatggcaacaatgtaccgtgtggatctaagaacgcgtcctactaaccttcgcattcgttggtccagtttgttgttatcgatcaacgtgacaaggttgtcgattccgcgtaagcatgcatacccaaggacgcctgttgcaattccaagtgagccagttccaacaatctttgtaatattagagcacttcattgtgttgcgcttgaaagtaaaatgcgaacaaattaagagataatctcgaaaccgcgacttcaaacgccaatatgatgtgcggcacacaataagcgttcatatccgctgggtgactttctcgctttaaaaaattatccgaaaaaatttttgacggctagctcagtcctaggtacgctagcattaaagaggagaaaatgactactcttgatgacacagcctacagatataggacatcagttccgggtgacgcagaggctatcgaagccttggacggttcattcactactgatacggtgtttagagtcaccgctacaggtgatggcttcaccttgagagaggttcctgtagacccacccttaacgaaagttttccctgatgacgaatcggatgacgagtctgatgctggtgaggacggtgaccctgattccagaacatttgtcgcatacggagatgatggtgacctggctggctttgttgtggtgtcctacagcggatggaatcgtagactcacagttgaggacatcgaagttgcacctgaacatcgtggtcacggtgttggtcgtgcactgatgggactggcaacagagtttgctagagaaagaggagccggacatttgtggttagaagtgaccaatgtcaacgctcctgctattcacgcatataggcgaatgggtttcactttgtgcggtcttgatactgctttgtatgacggaactgcttctgatggtgaacaagctctttacatgagtatgccatgtccatagcacgtccgacggcggcccacgggtcccaggcctcggagatccgtcccccttttcctttgtcgatatcatgtaattagttatgtcacgcttacattcacgccctccccccacatccgctctaaccgaaaaggaaggagttagacaacctgaagtctaggtccctatttatttttttatagttatgttagtattaagaacgttatttatatttcaaatttttcttttttttctgtacagacgcgtgtacgcatgtaacattatactgaaaaccttgcttgagaaggttttgggacgctcgaaggctttaatttgcaagctgcggccgcactcaatcccgactgtcaatcattcatccttgcgtcttttgaacatctatgcttccacaagtcaattcttgatttagtatacacataaccaaatttggatcaagtttgaagtaaaactttaacttcagctccttacatttgcactaagatctctgctactctggtcccaagtgaaccaccttttggaccctattgaccggaccttaacttgccaaacctaaacgcttaatgcctcagacgttttaatgcctctcaacacctccaaggttgctttcttgagcatgcctactaggaactttaacgaactgtggggttgcagacagtttcaggcgtgtcccgaccaatatggcctactagactctctgaaaaatcacagttttccagtagttccgatcaaattaccatcgaaatggtcccataaacggacatttgacatccgttcctgaattatagtcttccaccgtggatcatggtgttcctttttttcccaaagaatatcagcatcccttaactacgttagagaccttaattaacgcttcctcgctcactgactcgctgcgctcggtcgttcggctgcggcgagcggtatcagctcactcaaaggcggtaatacggttatccacagaatcaggggataacgcaggaaagaacatgtgagcaaaaggccagcaaaaggccaggaaccgtaaaaaggccgcgttgctggcgtttttccataggctccgcccccctgacgagcatcacaaaaatcgacgctcaagtcagaggtggcgaaacccgacaggactataaagataccaggcgtttccccctggaagctccctcgtgcgctctcctgttccgaccctgccgcttaccggatacctgtccgcctttctcccttcgggaagcgtggcgctttctcatagctcacgctgtaggtatctcagttcggtgtaggtcgttcgctccaagctgggctgtgtgcacgaaccccccgttcagcccgaccgctgcgccttatccggtaactatcgtcttgagtccaacccggtaagacacgacttatcgccactggcagcagccactggtaacaggattagcagagcgaggtatgtaggcggtgctacagagttcttgaagtggtggcctaactacggctacactagaagaacagtatttggtatctgcgctctgctgaagccagttaccttcggaaaaagagttggtagctcttgatccggcaaacaaaccaccgctggtagcggtggtttttttgtttgcaagcagcagattacgcgcagaaaaaaaggatctcaagaagatcctttgatcttttctacggggtctgacgctcagtggaacgaaaactcacgttaagggattttggtcatgagattatcaaagacgtcccagccaggacagaaatgcctcgacttcgctgctgcccaaggttgccgggtgacgcacaccgtggaaacggatgaaggcacgaacccagtggacataagcctgttcggttcgtaagctgtaatgcaagtagcgtatgcgctcacgcaactggtccagaaccttgaccgaacgcagcggtggtaacggcgcagtggcggttttcatggcttgttatgactgtttttttggggtacagtctatgcctcgggcatccaagcagcaagcgcgttacgccgtgggtcgatgtttgatgttatggagcagcaacgatgttacgcagcagggcagtcgccctaaaacaaagttaaacatcatgagggaagcggtgatcgccgaagtatcgactcaactatcagaggtagttggcgtcatcgagcgccatctcgaaccgacgttgctggccgtacatttgtacggctccgcagtggatggcggcctgaagccacacagtgatattgatttgctggttacggtgaccgtaaggcttgatgaaacaacgcggcgagctttgatcaacgaccttttggaaacttcggcttcccctggagagagcgagattctccgcgctgtagaagtcaccattgttgtgcacgacgacatcattccgtggcgttatccagctaagcgcgaactgcaatttggagaatggcagcgcaatgacattcttgcaggtatcttcgagccagccacgatcgacattgatctggctatcttgctgacaaaagcaagagaacatagcgttgccttggtaggtccagcggcggaggaactctttgatccggttcctgaacaggatctatttgaggcgctaaatgaaaccttaacgctatggaactcgccgcccgactgggctggtgatgagcgaaatgtagtgcttacgttgtcccgcatttggtacagcgcagtaaccggcaaaatcgcgccgaaggatgtcgctgccgactgggcaatggagcgcctgccggcccagtatcagcccgtcatacttgaagctagacaggcttatcttggacaagaagaagatcgcttggcctcgcgcgcagatcagttggaagaatttgtccactacgtgaaaggcgagatcaccaaggtagtcggcaaataactgtcagaccaagtttactcatatatactttagattgatttaaaacttcatttttaatttaaaaggatctaggtgaagatcctt

SEQ ID NO: 2708 - DNA, 465 bp, synthetic construct
  misc_feature 1..465: note = Description of Artificial Sequence: Synthetic polynucleotide
  source 1..465: mol_type = other DNA
ggtagtcaaggacctggttcaggtggtcagcagggtccaggaggacagggtccttacggcccttctgccgctgcagcagcagccgctgccgcaggaggatacggacctggtgctggacaacgatctcaaggaccaggaggacaaggtccttatggacctggcgctggccaacaaggacctggttctcagggtccaggttcaggaggccaacaaggcccaggaggtcaaggaccatacggaccatccgctgcggcagctgcagctgctgcaggtggatatggcccaggagccggacaacagggtcctggttcacaaggtccaggatctggtggtcaacagggaccaggcggccagggaccttatggtccaggagccgctgcagcagcagcagctgttggaggttacggccctggtgccggtcaacaaggcccaggatctcagggtcctggatctggaggacaacaa

SEQ ID NO: 2709 - DNA, 480 bp, synthetic construct
  misc_feature 1..480: note = Description of Artificial Sequence: Synthetic polynucleotide
  source 1..480: mol_type = other DNA
ggtcctggaggtcagggtccatacggaccttcagcagcagctgctgctgcagccgctggtggttatggacctggtgctggtcaacaaggaccgggttctcagggtccgggttcaggaggtcagcagggccctggtggacaaggaccttatggacctagtgcggctgcagcagctgccgccgcaggtggttacggtccaggcgctggtcaacaaggtccaggaagtggtggtcaacaaggacctggcggtcaaggaccctacggtagtggccaacaaggtccaggtggagcaggacagcagggtccgggaggccaaggaccttacggaccaggtgctgctgctgccgccgctgccgctgccggaggttacggtccaggagccggacaacagggtccaggtggagctggacaacaaggtccaggatcacaaggtcctggtggacaaggtccatacggtcctggtgctggtcaacagggacca

SEQ ID NO: 2710 - DNA, 945 bp, synthetic construct
  misc_feature 1..945: note = Description of Artificial Sequence: Synthetic polynucleotide
  source 1..945: mol_type = other DNA
ggtagtcaaggacctggttcaggtggtcagcagggtccaggaggacagggtccttacggcccttctgccgctgcagcagcagccgctgccgcaggaggatacggacctggtgctggacaacgatctcaaggaccaggaggacaaggtccttatggacctggcgctggccaacaaggacctggttctcagggtccaggttcaggaggccaacaaggcccaggaggtcaaggaccatacggaccatccgctgcggcagctgcagctgctgcaggtggatatggcccaggagccggacaacagggtcctggttcacaaggtccaggatctggtggtcaacagggaccaggcggccagggaccttatggtccaggagccgctgcagcagcagcagctgttggaggttacggccctggtgccggtcaacaaggcccaggatctcagggtcctggatctggaggacaacaaggtcctggaggtcagggtccatacggaccttcagcagcagctgctgctgcagccgctggtggttatggacctggtgctggtcaacaaggaccgggttctcagggtccgggttcaggaggtcagcagggccctggtggacaaggaccttatggacctagtgcggctgcagcagctgccgccgcaggtggttacggtccaggcgctggtcaacaaggtccaggaagtggtggtcaacaaggacctggcggtcaaggaccctacggtagtggccaacaaggtccaggtggagcaggacagcagggtccgggaggccaaggaccttacggaccaggtgctgctgctgccgccgctgccgctgccggaggttacggtccaggagccggacaacagggtccaggtggagctggacaacaaggtccaggatcacaaggtcctggtggacaaggtccatacggtcctggtgctggtcaacagggacca

SEQ ID NO: 2711 - DNA, 945 bp, synthetic construct
  misc_feature 1..945: note = Description of Artificial Sequence: Synthetic polynucleotide
  source 1..945: mol_type = other DNA
ggtggatatggcccaggagccggacaacagggtcctggttcacaaggtccaggatctggtggtcaacagggaccaggcggccagggaccttatggtccaggagccgctgcagcagcagcagctgttggaggttacggccctggtgccggtcaacaaggcccaggatctcagggtcctggatctggaggacaacaaggtcctggaggtcagggtccatacggaccttcagcagcagctgctgctgcagccgctggtggttatggacctggtgctggtcaacaaggaccgggttctcagggtccgggttcaggaggtcagcagggccctggtggacaaggaccttatggacctagtgcggctgcagcagctgccgccgcaggtggttacggtccaggcgctggtcaacaaggtccaggaagtggtggtcaacaaggacctggcggtcaaggaccctacggtagtggccaacaaggtccaggtggagcaggacagcagggtccgggaggccaaggaccttacggaccaggtgctgctgctgccgccgctgccgctgccggaggttacggtccaggagccggacaacagggtccaggtggagctggacaacaaggtccaggatcacaaggtcctggtggacaaggtccatacggtcctggtgctggtcaacagggaccaggtagtcaaggacctggttcaggtggtcagcagggtccaggaggacagggtccttacggcccttctgccgctgcagcagcagccgctgccgcaggaggatacggacctggtgctggacaacgatctcaaggaccaggaggacaaggtccttatggacctggcgctggccaacaaggacctggttctcagggtccaggttcaggaggccaacaaggcccaggaggtcaaggaccatacggaccatccgctgcggcagctgcagctgctgca

SEQ ID NO: 2712 - DNA, 945 bp, synthetic construct
  misc_feature 1..945: note = Description of Artificial Sequence: Synthetic polynucleotide
  source 1..945: mol_type = other DNA
ggtcctggaggtcagggtccatacggaccttcagcagcagctgctgctgcagccgctggtggttatggacctggtgctggtcaacaaggaccgggttctcagggtccgggttcaggaggtcagcagggccctggtggacaaggaccttatggacctagtgcggctgcagcagctgccgccgcaggtggttacggtccaggcgctggtcaacaaggtccaggaagtggtggtcaacaaggacctggcggtcaaggaccctacggtagtggccaacaaggtccaggtggagcaggacagcagggtccgggaggccaaggaccttacggaccaggtgctgctgctgccgccgctgccgctgccggaggttacggtccaggagccggacaacagggtccaggtggagctggacaacaaggtccaggatcacaaggtcctggtggacaaggtccatacggtcctggtgctggtcaacagggaccaggtagtcaaggacctggttcaggtggtcagcagggtccaggaggacagggtccttacggcccttctgccgctgcagcagcagccgctgccgcaggaggatacggacctggtgctggacaacgatctcaaggaccaggaggacaaggtccttatggacctggcgctggccaacaaggacctggttctcagggtccaggttcaggaggccaacaaggcccaggaggtcaaggaccatacggaccatccgctgcggcagctgcagctgctgcaggtggatatggcccaggagccggacaacagggtcctggttcacaaggtccaggatctggtggtcaacagggaccaggcggccagggaccttatggtccaggagccgctgcagcagcagcagctgttggaggttacggccctggtgccggtcaacaaggcccaggatctcagggtcctggatctggaggacaacaa

SEQ ID NO: 2713 - DNA, 2835 bp, synthetic construct
  misc_feature 1..2835: note = Description of Artificial Sequence: Synthetic polynucleotide
  source 1..2835: mol_type = other DNA
ggtagtcaaggacctggttcaggtggtcagcagggtccaggaggacagggtccttacggcccttctgccgctgcagcagcagccgctgccgcaggaggatacggacctggtgctggacaacgatctcaaggaccaggaggacaaggtccttatggacctggcgctggccaacaaggacctggttctcagggtccaggttcaggaggccaacaaggcccaggaggtcaaggaccatacggaccatccgctgcggcagctgcagctgctgcaggtggatatggcccaggagccggacaacagggtcctggttcacaaggtccaggatctggtggtcaacagggaccaggcggccagggaccttatggtccaggagccgctgcagcagcagcagctgttggaggttacggccctggtgccggtcaacaaggcccaggatctcagggtcctggatctggaggacaacaaggtcctggaggtcagggtccatacggaccttcagcagcagctgctgctgcagccgctggtggttatggacctggtgctggtcaacaaggaccgggttctcagggtccgggttcaggaggtcagcagggccctggtggacaaggaccttatggacctagtgcggctgcagcagctgccgccgcaggtggttacggtccaggcgctggtcaacaaggtccaggaagtggtggtcaacaaggacctggcggtcaaggaccctacggtagtggccaacaaggtccaggtggagcaggacagcagggtccgggaggccaaggaccttacggaccaggtgctgctgctgccgccgctgccgctgccggaggttacggtccaggagccggacaacagggtccaggtggagctggacaacaaggtccaggatcacaaggtcctggtggacaaggtccatacggtcctggtgctggtcaacagggaccaggtagtcaaggacctggttcaggtggtcagcagggtccaggaggacagggtccttacggcccttctgccgctgcagcagcagccgctgccgcaggaggatacggacctggtgctggacaacgatctcaaggaccaggaggacaaggtccttatggacctggcgctggccaacaaggacctggttctcagggtccaggttcaggaggccaacaaggcccaggaggtcaaggaccatacggaccatccgctgcggcagctgcagctgctgcaggtggatatggcccaggagccggacaacagggtcctggttcacaaggtccaggatctggtggtcaacagggaccaggcggccagggaccttatggtccaggagccgctgcagcagcagcagctgttggaggttacggccctggtgccggtcaacaaggcccaggatctcagggtcctggatctggaggacaacaaggtcctggaggtcagggtccatacggaccttcagcagcagctgctgctgcagccgctggtggttatggacctggtgctggtcaacaaggaccgggttctcagggtccgggttcaggaggtcagcagggccctggtggacaaggaccttatggacctagtgcggctgcagcagctgccgccgcaggtggttacggtccaggcgctggtcaacaaggtccaggaagtggtggtcaacaaggacctggcggtcaaggaccctacggtagtggccaacaaggtccaggtggagcaggacagcagggtccgggaggccaaggaccttacggaccaggtgctgctgctgccgccgctgccgctgccggaggttacggtccaggagccggacaacagggtccaggtggagctggacaacaaggtccaggatcacaaggtcctggtggacaaggtccatacggtcctggtgctggtcaacagggaccaggtagtcaaggacctggttcaggtggtcagcagggtccaggaggacagggtccttacggcccttctgccgctgcagcagcagccgctgccgcaggaggatacggacctggtgctggacaacgatctcaaggaccaggaggacaaggtccttatggacctggcgctggccaacaaggacctggttctcagggtccaggttcaggaggccaacaaggcccaggaggtcaaggaccatacggaccatccgctgcggcagctgcagctgctgcaggtggatatggcccaggagccggacaacagggtcctggttcacaaggtccaggatctggtggtcaacagggaccaggcggccagggaccttatggtccaggagccgctgcagcagcagcagctgttggaggttacggccctggtgccggtcaacaaggcccaggatctcagggtcctggatctggaggacaacaaggtcctggaggtcagggtccatacggaccttcagcagcagctgctgctgcagccgctggtggttatggacctggtgctggtcaacaaggaccgggttctcagggtccgggttcaggaggtcagcagggccctggtggacaaggaccttatggacctagtgcggctgcagcagctgccgccgcaggtggttacggtccaggcgctggtcaacaaggtccaggaagtggtggtcaacaaggacctggcggtcaaggaccctacggtagtggccaacaaggtccaggtggagcaggacagcagggtccgggaggccaaggaccttacggaccaggtgctgctgctgccgccgctgccgctgccggaggttacggtccaggagccggacaacagggtccaggtggagctggacaacaaggtccaggatcacaaggtcctggtggacaaggtccatacggtcctggtgctggtcaacagggacca

SEQ ID NO: 2714 - DNA, 2835 bp, synthetic construct
  misc_feature 1..2835: note = Description of Artificial Sequence: Synthetic polynucleotide
  source 1..2835: mol_type = other DNA
ggtggatatggcccaggagccggacaacagggtcctggttcacaaggtccaggatctggtggtcaacagggaccaggcggccagggaccttatggtccaggagccgctgcagcagcagcagctgttggaggttacggccctggtgccggtcaacaaggcccaggatctcagggtcctggatctggaggacaacaaggtcctggaggtcagggtccatacggaccttcagcagcagctgctgctgcagccgctggtggttatggacctggtgctggtcaacaaggaccgggttctcagggtccgggttcaggaggtcagcagggccctggtggacaaggaccttatggacctagtgcggctgcagcagctgccgccgcaggtggttacggtccaggcgctggtcaacaaggtccaggaagtggtggtcaacaaggacctggcggtcaaggaccctacggtagtggccaacaaggtccaggtggagcaggacagcagggtccgggaggccaaggaccttacggaccaggtgctgctgctgccgccgctgccgctgccggaggttacggtccaggagccggacaacagggtccaggtggagctggacaacaaggtccaggatcacaaggtcctggtggacaaggtccatacggtcctggtgctggtcaacagggaccaggtagtcaaggacctggttcaggtggtcagcagggtccaggaggacagggtccttacggcccttctgccgctgcagcagcagccgctgccgcaggaggatacggacctggtgctggacaacgatctcaaggaccaggaggacaaggtccttatggacctggcgctggccaacaaggacctggttctcagggtccaggttcaggaggccaacaaggcccaggaggtcaaggaccatacggaccatccgctgcggcagctgcagctgctgcaggtggatatggcccaggagccggacaacagggtcctggttcacaaggtccaggatctggtggtcaacagggaccaggcggccagggaccttatggtccaggagccgctgcagcagcagcagctgttggaggttacggccctggtgccggtcaacaaggcccaggatctcagggtcctggatctggaggacaacaaggtcctggaggtcagggtccatacggaccttcagcagcagctgctgctgcagccgctggtggttatggacctggtgctggtcaacaaggaccgggttctcagggtccgggttcaggaggtcagcagggccctggtggacaaggaccttatggacctagtgcggctgcagcagctgccgccgcaggtggttacggtccaggcgctggtcaacaaggtccaggaagtggtggtcaacaaggacctggcggtcaaggaccctacggtagtggccaacaaggtccaggtggagcaggacagcagggtccgggaggccaaggaccttacggaccaggtgctgctgctgccgccgctgccgctgccggaggttacggtccaggagccggacaacagggtccaggtggagctggacaacaaggtccaggatcacaaggtcctggtggacaaggtccatacggtcctggtgctggtcaacagggaccaggtagtcaaggacctggttcaggtggtcagcagggtccaggaggacagggtccttacggcccttctgccgctgcagcagcagccgctgccgcaggaggatacggacctggtgctggacaacgatctcaaggaccaggaggacaaggtccttatggacctggcgctggccaacaaggacctggttctcagggtccaggttcaggaggccaacaaggcccaggaggtcaaggaccatacggaccatccgctgcggcagctgcagctgctgcaggtggatatggcccaggagccggacaacagggtcctggttcacaaggtccaggatctggtggtcaacagggaccaggcggccagggaccttatggtccaggagccgctgcagcagcagcagctgttggaggttacggccctggtgccggtcaacaaggcccaggatctcagggtcctggatctggaggacaacaaggtcctggaggtcagggtccatacggaccttcagcagcagctgctgctgcagccgctggtggttatggacctggtgctggtcaacaaggaccgggttctcagggtccgggttcaggaggtcagcagggccctggtggacaaggaccttatggacctagtgcggctgcagcagctgccgccgcaggtggttacggtccaggcgctggtcaacaaggtccaggaagtggtggtcaacaaggacctggcggtcaaggaccctacggtagtggccaacaaggtccaggtggagcaggacagcagggtccgggaggccaaggaccttacggaccaggtgctgctgctgccgccgctgccgctgccggaggttacggtccaggagccggacaacagggtccaggtggagctggacaacaaggtccaggatcacaaggtcctggtggacaaggtccatacggtcctggtgctggtcaacagggaccaggtagtcaaggacctggttcaggtggtcagcagggtccaggaggacagggtccttacggcccttctgccgctgcagcagcagccgctgccgcaggaggatacggacctggtgctggacaacgatctcaaggaccaggaggacaaggtccttatggacctggcgctggccaacaaggacctggttctcagggtccaggttcaggaggccaacaaggcccaggaggtcaaggaccatacggaccatccgctgcggcagctgcagctgctgca

SEQ ID NO: 2715 - DNA, 2835 bp, synthetic construct
  misc_feature 1..2835: note = Description of Artificial Sequence: Synthetic polynucleotide
  source 1..2835: mol_type = other DNA
ggtcctggaggtcagggtccatacggaccttcagcagcagctgctgctgcagccgctggtggttatggacctggtgctggtcaacaaggaccgggttctcagggtccgggttcaggaggtcagcagggccctggtggacaaggaccttatggacctagtgcggctgcagcagctgccgccgcaggtggttacggtccaggcgctggtcaacaaggtccaggaagtggtggtcaacaaggacctggcggtcaaggaccctacggtagtggccaacaaggtccaggtggagcaggacagcagggtccgggaggccaaggaccttacggaccaggtgctgctgctgccgccgctgccgctgccggaggttacggtccaggagccggacaacagggtccaggtggagctggacaacaaggtccaggatcacaaggtcctggtggacaaggtccatacggtcctggtgctggtcaacagggaccaggtagtcaaggacctggttcaggtggtcagcagggtccaggaggacagggtccttacggcccttctgccgctgcagcagcagccgctgccgcaggaggatacggacctggtgctggacaacgatctcaaggaccaggaggacaaggtccttatggacctggcgctggccaacaaggacctggttctcagggtccaggttcaggaggccaacaaggcccaggaggtcaaggaccatacggaccatccgctgcggcagctgcagctgctgcaggtggatatggcccaggagccggacaacagggtcctggttcacaaggtccaggatctggtggtcaacagggaccaggcggccagggaccttatggtccaggagccgctgcagcagcagcagctgttggaggttacggccctggtgccggtcaacaaggcccaggatctcagggtcctggatctggaggacaacaaggtcctggaggtcagggtccatacggaccttcagcagcagctgctgctgcagccgctggtggttatggacctggtgctggtcaacaaggaccgggttctcagggtccgggttcaggaggtcagcagggccctggtggacaaggaccttatggacctagtgcggctgcagcagctgccgccgcaggtggttacggtccaggcgctggtcaacaaggtccaggaagtggtggtcaacaaggacctggcggtcaaggaccctacggtagtggccaacaaggtccaggtggagcaggacagcagggtccgggaggccaaggaccttacggaccaggtgctgctgctgccgccgctgccgctgccggaggttacggtccaggagccggacaacagggtccaggtggagctggacaacaaggtccaggatcacaaggtcctggtggacaaggtccatacggtcctggtgctggtcaacagggaccaggtagtcaaggacctggttcaggtggtcagcagggtccaggaggacagggtccttacggcccttctgccgctgcagcagcagccgctgccgcaggaggatacggacctggtgctggacaacgatctcaaggaccaggaggacaaggtccttatggacctggcgctggccaacaaggacctggttctcagggtccaggttcaggaggccaacaaggcccaggaggtcaaggaccatacggaccatccgctgcggcagctgcagctgctgcaggtggatatggcccaggagccggacaacagggtcctggttcacaaggtccaggatctggtggtcaacagggaccaggcggccagggaccttatggtccaggagccgctgcagcagcagcagctgttggaggttacggccctggtgccggtcaacaaggcccaggatctcagggtcctggatctggaggacaacaaggtcctggaggtcagggtccatacggaccttcagcagcagctgctgctgcagccgctggtggttatggacctggtgctggtcaacaaggaccgggttctcagggtccgggttcaggaggtcagcagggccctggtggacaaggaccttatggacctagtgcggctgcagcagctgccgccgcaggtggttacggtccaggcgctggtcaacaaggtccaggaagtggtggtcaacaaggacctggcggtcaaggaccctacggtagtggccaacaaggtccaggtggagcaggacagcagggtccgggaggccaaggaccttacggaccaggtgctgctgctgccgccgctgccgctgccggaggttacggtccaggagccggacaacagggtccaggtggagctggacaacaaggtccaggatcacaaggtcctggtggacaaggtccatacggtcctggtgctggtcaacagggaccaggtagtcaaggacctggttcaggtggtcagcagggtccaggaggacagggtccttacggcccttctgccgctgcagcagcagccgctgccgcaggaggatacggacctggtgctggacaacgatctcaaggaccaggaggacaaggtccttatggacctggcgctggccaacaaggacctggttctcagggtccaggttcaggaggccaacaaggcccaggaggtcaaggaccatacggaccatccgctgcggcagctgcagctgctgcaggtggatatggcccaggagccggacaacagggtcctggttcacaaggtccaggatctggtggtcaacagggaccaggcggccagggaccttatggtccaggagccgctgcagcagcagcagctgttggaggttacggccctggtgccggtcaacaaggcccaggatctcagggtcctggatctggaggacaacaa

SEQ ID NO: 2716 - protein, 155 aa, Argiope bruennichi
GSQGPGSGGQQGPGGQGPYGPSAAAAAAAAAGGYGPGAGQRSQGPGGQGPYGPGAGQQGPGSQGPGSGGQQGPGGQGPYGPSAAAAAAAAGGYGPGAGQQGPGSQGPGSGGQQGPGGQGPYGPGAAAAAAAVGGYGPGAGQQGPGSQGPGSGGQQ

SEQ ID NO: 2717 - protein, 160 aa, synthetic construct
  REGION 1..160: note = Description of Artificial Sequence: Synthetic polypeptide
GPGGQGPYGPSAAAAAAAAGGYGPGAGQQGPGSQGPGSGGQQGPGGQGPYGPSAAAAAAAAGGYGPGAGQQGPGSGGQQGPGGQGPYGSGQQGPGGAGQQGPGGQGPYGPGAAAAAAAAAGGYGPGAGQQGPGGAGQQGPGSQGPGGQGPYGPGAGQQGP

SEQ ID NO: 2718 - protein, 315 aa, synthetic construct
  REGION 1..315: note = Description of Artificial Sequence: Synthetic polypeptide
GSQGPGSGGQQGPGGQGPYGPSAAAAAAAAAGGYGPGAGQRSQGPGGQGPYGPGAGQQGPGSQGPGSGGQQGPGGQGPYGPSAAAAAAAAGGYGPGAGQQGPGSQGPGSGGQQGPGGQGPYGPGAAAAAAAVGGYGPGAGQQGPGSQGPGSGGQQGPGGQGPYGPSAAAAAAAAGGYGPGAGQQGPGSQGPGSGGQQGPGGQGPYGPSAAAAAAAAGGYGPGAGQQGPGSGGQQGPGGQGPYGSGQQGPGGAGQQGPGGQGPYGPGAAAAAAAAAGGYGPGAGQQGPGGAGQQGPGSQGPGGQGPYGPGAGQQGP

SEQ ID NO: 2719 - protein, 315 aa, synthetic construct
  REGION 1..315: note = Description of Artificial Sequence: Synthetic polypeptide
GGYGPGAGQQGPGSQGPGSGGQQGPGGQGPYGPGAAAAAAAVGGYGPGAGQQGPGSQGPGSGGQQGPGGQGPYGPSAAAAAAAAGGYGPGAGQQGPGSQGPGSGGQQGPGGQGPYGPSAAAAAAAAGGYGPGAGQQGPGSGGQQGPGGQGPYGSGQQGPGGAGQQGPGGQGPYGPGAAAAAAAAAGGYGPGAGQQGPGGAGQQGPGSQGPGGQGPYGPGAGQQGPGSQGPGSGGQQGPGGQGPYGPSAAAAAAAAAGGYGPGAGQRSQGPGGQGPYGPGAGQQGPGSQGPGSGGQQGPGGQGPYGPSAAAAAAAA

SEQ ID NO: 2720 - protein, 315 aa, synthetic construct
  REGION 1..315: note = Description of Artificial Sequence: Synthetic polypeptide
GPGGQGPYGPSAAAAAAAAGGYGPGAGQQGPGSQGPGSGGQQGPGGQGPYGPSAAAAAAAAGGYGPGAGQQGPGSGGQQGPGGQGPYGSGQQGPGGAGQQGPGGQGPYGPGAAAAAAAAAGGYGPGAGQQGPGGAGQQGPGSQGPGGQGPYGPGAGQQGPGSQGPGSGGQQGPGGQGPYGPSAAAAAAAAAGGYGPGAGQRSQGPGGQGPYGPGAGQQGPGSQGPGSGGQQGPGGQGPYGPSAAAAAAAAGGYGPGAGQQGPGSQGPGSGGQQGPGGQGPYGPGAAAAAAAVGGYGPGAGQQGPGSQGPGSGGQQ

SEQ ID NO: 2721 - protein, 945 aa, synthetic construct
  REGION 1..945: note = Description of Artificial Sequence: Synthetic polypeptide
GSQGPGSGGQQGPGGQGPYGPSAAAAAAAAAGGYGPGAGQRSQGPGGQGPYGPGAGQQGPGSQGPGSGGQQGPGGQGPYGPSAAAAAAAAGGYGPGAGQQGPGSQGPGSGGQQGPGGQGPYGPGAAAAAAAVGGYGPGAGQQGPGSQGPGSGGQQGPGGQGPYGPSAAAAAAAAGGYGPGAGQQGPGSQGPGSGGQQGPGGQGPYGPSAAAAAAAAGGYGPGAGQQGPGSGGQQGPGGQGPYGSGQQGPGGAGQQGPGGQGPYGPGAAAAAAAAAGGYGPGAGQQGPGGAGQQGPGSQGPGGQGPYGPGAGQQGPGSQGPGSGGQQGPGGQGPYGPSAAAAAAAAAGGYGPGAGQRSQGPGGQGPYGPGAGQQGPGSQGPGSGGQQGPGGQGPYGPSAAAAAAAAGGYGPGAGQQGPGSQGPGSGGQQGPGGQGPYGPGAAAAAAAVGGYGPGAGQQGPGSQGPGSGGQQGPGGQGPYGPSAAAAAAAAGGYGPGAGQQGPGSQGPGSGGQQGPGGQGPYGPSAAAAAAAAGGYGPGAGQQGPGSGGQQGPGGQGPYGSGQQGPGGAGQQGPGGQGPYGPGAAAAAAAAAGGYGPGAGQQGPGGAGQQGPGSQGPGGQGPYGPGAGQQGPGSQGPGSGGQQGPGGQGPYGPSAAAAAAAAAGGYGPGAGQRSQGPGGQGPYGPGAGQQGPGSQGPGSGGQQGPGGQGPYGPSAAAAAAAAGGYGPGAGQQGPGSQGPGSGGQQGPGGQGPYGPGAAAAAAAVGGYGPGAGQQGPGSQGPGSGGQQGPGGQGPYGPSAAAAAAAAGGYGPGAGQQGPGSQGPGSGGQQGPGGQGPYGPSAAAAAAAAGGYGPGAGQQGPGSGGQQGPGGQGPYGSGQQGPGGAGQQGPGGQGPYGPGAAAAAAAAAGGYGPGAGQQGPGGAGQQGPGSQGPGGQGPYGPGAGQQGP

SEQ ID NO: 2722 - protein, 945 aa, synthetic construct
  REGION 1..945: note = Description of Artificial Sequence: Synthetic polypeptide
GGYGPGAGQQGPGSQGPGSGGQQGPGGQGPYGPGAAAAAAAVGGYGPGAGQQGPGSQGPGSGGQQGPGGQGPYGPSAAAAAAAAGGYGPGAGQQGPGSQGPGSGGQQGPGGQGPYGPSAAAAAAAAGGYGPGAGQQGPGSGGQQGPGGQGPYGSGQQGPGGAGQQGPGGQGPYGPGAAAAAAAAAGGYGPGAGQQGPGGAGQQGPGSQGPGGQGPYGPGAGQQGPGSQGPGSGGQQGPGGQGPYGPSAAAAAAAAAGGYGPGAGQRSQGPGGQGPYGPGAGQQGPGSQGPGSGGQQGPGGQGPYGPSAAAAAAAAGGYGPGAGQQGPGSQGPGSGGQQGPGGQGPYGPGAAAAAAAVGGYGPGAGQQGPGSQGPGSGGQQGPGGQGPYGPSAAAAAAAAGGYGPGAGQQGPGSQGPGSGGQQGPGGQGPYGPSAAAAAAAAGGYGPGAGQQGPGSGGQQGPGGQGPYGSGQQGPGGAGQQGPGGQGPYGPGAAAAAAAAAGGYGPGAGQQGPGGAGQQGPGSQGPGGQGPYGPGAGQQGPGSQGPGSGGQQGPGGQGPYGPSAAAAAAAAAGGYGPGAGQRSQGPGGQGPYGPGAGQQGPGSQGPGSGGQQGPGGQGPYGPSAAAAAAAAGGYGPGAGQQGPGSQGPGSGGQQGPGGQGPYGPGAAAAAAAVGGYGPGAGQQGPGSQGPGSGGQQGPGGQGPYGPSAAAAAAAAGGYGPGAGQQGPGSQGPGSGGQQGPGGQGPYGPSAAAAAAAAGGYGPGAGQQGPGSGGQQGPGGQGPYGSGQQGPGGAGQQGPGGQGPYGPGAAAAAAAAAGGYGPGAGQQGPGGAGQQGPGSQGPGGQGPYGPGAGQQGPGSQGPGSGGQQGPGGQGPYGPSAAAAAAAAAGGYGPGAGQRSQGPGGQGPYGPGAGQQGPGSQGPGSGGQQGPGGQGPYGPSAAAAAAAA

SEQ ID NO: 2723 - protein, 945 aa, synthetic construct
  REGION 1..945: note = Description of Artificial Sequence: Synthetic polypeptide
GPGGQGPYGPSAAAAAAAAGGYGPGAGQQGPGSQGPGSGGQQGPGGQGPYGPSAAAAAAAAGGYGPGAGQQGPGSGGQQGPGGQGPYGSGQQGPGGAGQQGPGGQGPYGPGAAAAAAAAAGGYGPGAGQQGPGGAGQQGPGSQGPGGQGPYGPGAGQQGPGSQGPGSGGQQGPGGQGPYGPSAAAAAAAAAGGYGPGAGQRSQGPGGQGPYGPGAGQQGPGSQGPGSGGQQGPGGQGPYGPSAAAAAAAAGGYGPGAGQQGPGSQGPGSGGQQGPGGQGPYGPGAAAAAAAVGGYGPGAGQQGPGSQGPGSGGQQGPGGQGPYGPSAAAAAAAAGGYGPGAGQQGPGSQGPGSGGQQGPGGQGPYGPSAAAAAAAAGGYGPGAGQQGPGSGGQQGPGGQGPYGSGQQGPGGAGQQGPGGQGPYGPGAAAAAAAAAGGYGPGAGQQGPGGAGQQGPGSQGPGGQGPYGPGAGQQGPGSQGPGSGGQQGPGGQGPYGPSAAAAAAAAAGGYGPGAGQRSQGPGGQGPYGPGAGQQGPGSQGPGSGGQQGPGGQGPYGPSAAAAAAAAGGYGPGAGQQGPGSQGPGSGGQQGPGGQGPYGPGAAAAAAAVGGYGPGAGQQGPGSQGPGSGGQQGPGGQGPYGPSAAAAAAAAGGYGPGAGQQGPGSQGPGSGGQQGPGGQGPYGPSAAAAAAAAGGYGPGAGQQGPGSGGQQGPGGQGPYGSGQQGPGGAGQQGPGGQGPYGPGAAAAAAAAAGGYGPGAGQQGPGGAGQQGPGSQGPGGQGPYGPGAGQQGPGSQGPGSGGQQGPGGQGPYGPSAAAAAAAAAGGYGPGAGQRSQGPGGQGPYGPGAGQQGPGSQGPGSGGQQGPGGQGPYGPSAAAAAAAAGGYGPGAGQQGPGSQGPGSGGQQGPGGQGPYGPGAAAAAAAVGGYGPGAGQQGPGSQGPGSGGQQ

SEQ ID NO: 2724 - DNA, 2604 bp, synthetic construct
  misc_feature 1..2604: note = Description of Artificial Sequence: Synthetic polynucleotide
  source 1..2604: mol_type = other DNA
atgagatttccttcaatttttactgctgttttattcgcagcatcctccgcattagctgctccagtcaacactacaacagaagatgaaacggcacaaattccggctgaagctgtcatcggttactcagatttagaaggggatttcgatgttgctgttttgccattttccaacagcacaaataacgggttattgtttataaatactactattgccagcattgctgctaaagaagaaggggtatctctcgagaaaagagaggctgaagcaggtggtgcaggtcaaagaggttatggaggactaggtaatcaaggagctggtcgcggaggattaggaggtcaaggagctggtgctgccgccgctgctgctgctggaggtgcaggacagggtggatacggtggtcttggtaatcagggagcaggtcgaggtggacagggcgccgcggctgccgctggtggagccggacaaggtggttatggtggcttaggtagtcaaggtgctggtagaggaggtcagggagctggagctgctgccgccgcagcagtaggagctggtcaagaaggtatcagaggacaaggagctggtcagggtggttatggaggcttaggatctcagggtagcggtagaggaggattaggtggtcaaggagcaggtgctgccgctgccgctgctggtggagctggacaaggtggtttaggtggtcaaggtgcaggccagggagccggtgccgctgcggcagctgctggtggtgttagacagggaggctatggtggcttaggatcccagggtgctggccgaggtggtcagggagcaggtgctgcagcagccgctgcaggtggtgcaggtcaaagaggttatggaggactaggtaatcaaggagctggtcgcggaggattaggaggtcaaggagctggtgctgccgccgctgctgctgctggaggtgcaggacagggtggatacggtggtcttggtaatcagggagcaggtcgaggtggacagggcgccgcggctgccgctggtggagccggacaaggtggttatggtggcttaggtagtcaaggtgctggtagaggaggtcagggagctggagctgctgccgccgcagcagtaggagctggtcaagaaggtatcagaggacaaggagctggtcagggtggttatggaggcttaggatctcagggtagcggtagaggaggattaggtggtcaaggagcaggtgctgccgctgccgctgctggtggagctggacaaggtggtttaggtggtcaaggtgcaggccagggagccggtgccgctgcggcagctgctggtggtgttagacagggaggctatggtggcttaggatcccagggtgctggccgaggtggtcagggagcaggtgctgcagcagccgctgcaggtggtgcaggtcaaagaggttatggaggactaggtaatcaaggagctggtcgcggaggattaggaggtcaaggagctggtgctgccgccgctgctgctgctggaggtgcaggacagggtggatacggtggtcttggtaatcagggagcaggtcgaggtggacagggcgccgcggctgccgctggtggagccggacaaggtggttatggtggcttaggtagtcaaggtgctggtagaggaggtcagggagctggagctgctgccgccgcagcagtaggagctggtcaagaaggtatcagaggacaaggagctggtcagggtggttatggaggcttaggatctcagggtagcggtagaggaggattaggtggtcaaggagcaggtgctgccgctgccgctgctggtggagctggacaaggtggtttaggtggtcaaggtgcaggccagggagccggtgccgctgcggcagctgctggtggtgttagacagggaggctatggtggcttaggatcccagggtgctggccgaggtggtcagggagcaggtgctgcagcagccgctgcaggtggtgcaggtcaaagaggttatggaggactaggtaatcaaggagctggtcgcggaggattaggaggtcaaggagctggtgctgccgccgctgctgctgctggaggtgcaggacagggtggatacggtggtcttggtaatcagggagcaggtcgaggtggacagggcgccgcggctgccgctggtggagccggacaaggtggttatggtggcttaggtagtcaaggtgctggtagaggaggtcagggagctggagctgctgccgccgcagcagtaggagctggtcaagaaggtatcagaggacaaggagctggtcagggtggttatggaggcttaggatctcagggtagcggtagaggaggattaggtggtcaaggagcaggtgctgccgctgccgctgctggtggagctggacaaggtggtttaggtggtcaaggtgcaggccagggagccggtgccgctgcggcagctgctggtggtgttagacagggaggctatggtggcttaggatcccagggtgctggccgaggtggtcagggagcaggtgctgcagcagccgctgcaggtgactacaaagatgacgacgataaagattacaaagacgatgacgataaggactataaagatgatgacgacaaataataa

SEQ ID NO: 2725 - DNA, 3264 bp, synthetic construct
  misc_feature 1..3264: note = Description of Artificial Sequence: Synthetic polynucleotide
  source 1..3264: mol_type = other DNA
atgagatttccttcaatttttactgctgttttattcgcagcatcctccgcattagctgctccagtcaacactacaacagaagatgaaacggcacaaattccggctgaagctgtcatcggttactcagatttagaaggggatttcgatgttgctgttttgccattttccaacagcacaaataacgggttattgtttataaatactactattgccagcattgctgctaaagaagaaggggtatctctcgagaaaagagaggctgaagcaggttcaggtgctggtcaaggtaccggtgctggtgctggtgctgctgctgcagcagccggtgccgcaggtagtggagctggtcaaggtgctggatctggagcaggcgcggctgcagcggcggccgcggcttccgctgcaggtgcgggccaaggtgctggatcaggtagcggagctggtgcggctgcggctgctgcggccgccgctggtgctggccaaggagctggaagcggatccggagccggcgcggctgccgctgctgccgcagcagccgcagcagctcaacaacaacaacaacagcaagcagcagctgctgcagcagctgccgctgcagccgcagctggttctggtcaaggtgcctctttcggagtaacgcaacaattcggtgcaccatctggtgctgcctcctctgctgctgccgctgctgctgcagcggctgccgccgctgctggcagtggtgcaggccaagaagctggcacaggtgctggtgcagccgcggctgctgcagccgcaggagcagccggatcgggtgcaggtcaaggcgctggaagtggagccggtgctgctgctgctgcggctgcagctgcctcagctgctggcgcgggacaaggtgctggttctggttcaggagctggtgctgccgcagctgctgctgctgccgccgctgcggcacaacagcagcagcagcagcaagcggcagcagctgcagctgctgccgctgcagctgccgcaggttcaggtgctggtcaaggtaccggtgctggtgctggtgctgctgctgcagcagccggtgccgcaggtagtggagctggtcaaggtgctggatctggagcaggcgcggctgcagcggcggccgcggcttccgctgcaggtgcgggccaaggtgctggatcaggtagcggagctggtgcggctgcggctgctgcggccgccgctggtgctggccaaggagctggaagcggatccggagccggcgcggctgccgctgctgccgcagcagccgcagcagctcaacaacaacaacaacagcaagcagcagctgctgcagcagctgccgctgcagccgcagctggttctggtcaaggtgcctctttcggagtaacgcaacaattcggtgcaccatctggtgctgcctcctctgctgctgccgctgctgctgcagcggctgccgccgctgctggcagtggtgcaggccaagaagctggcacaggtgctggtgcagccgcggctgctgcagccgcaggagcagccggatcgggtgcaggtcaaggcgctggaagtggagccggtgctgctgctgctgcggctgcagctgcctcagctgctggcgcgggacaaggtgctggttctggttcaggagctggtgctgccgcagctgctgctgctgccgccgctgcggcacaacagcagcagcagcagcaagcggcagcagctgcagctgctgccgctgcagctgccgcaggttcaggtgctggtcaaggtaccggtgctggtgctggtgctgctgctgcagcagccggtgccgcaggtagtggagctggtcaaggtgctggatctggagcaggcgcggctgcagcggcggccgcggcttccgctgcaggtgcgggccaaggtgctggatcaggtagcggagctggtgcggctgcggctgctgcggccgccgctggtgctggccaaggagctggaagcggatccggagccggcgcggctgccgctgctgccgcagcagccgcagcagctcaacaacaacaacaacagcaagcagcagctgctgcagcagctgccgctgcagccgcagctggttctggtcaaggtgcctctttcggagtaacgcaacaattcggtgcaccatctggtgctgcctcctctgctgctgccgctgctgctgcagcggctgccgccgctgctggcagtggtgcaggccaagaagctggcacaggtgctggtgcagccgcggctgctgcagccgcaggagcagccggatcgggtgcaggtcaaggcgctggaagtggagccggtgctgctgctgctgcggctgcagctgcctcagctgctggcgcgggacaaggtgctggttctggttcaggagctggtgctgccgcagctgctgctgctgccgccgctgcggcacaacagcagcagcagcagcaagcggcagcagctgcagctgctgccgctgcagctgccgcaggttcaggtgctggtcaaggtaccggtgctggtgctggtgctgctgctgcagcagccggtgccgcaggtagtggagctggtcaaggtgctggatctggagcaggcgcggctgcagcggcggccgcggcttccgctgcaggtgcgggccaaggtgctggatcaggtagcggagctggtgcggctgcggctgctgcggccgccgctggtgctggccaaggagctggaagcggatccggagccggcgcggctgccgctgctgccgcagcagccgcagcagctcaacaacaacaacaacagcaagcagcagctgctgcagcagctgccgctgcagccgcagctggttctggtcaaggtgcctctttcggagtaacgcaacaattcggtgcaccatctggtgctgcctcctctgctgctgccgctgctgctgcagcggctgccgccgctgctggcagtggtgcaggccaagaagctggcacaggtgctggtgcagccgcggctgctgcagccgcaggagcagccggatcgggtgcaggtcaaggcgctggaagtggagccggtgctgctgctgctgcggctgcagctgcctcagctgctggcgcgggacaaggtgctggttctggttcaggagctggtgctgccgcagctgctgctgctgccgccgctgcggcacaacagcagcagcagcagcaagcggcagcagctgcagctgctgccgctgcagctgccgcaggtgactacaaagatgacgacgataaagattacaaagacgatgacgataaggactataaagatgatgacgacaaataataa

SEQ ID NO: 2726 - DNA, 3084 bp, synthetic construct
  misc_feature 1..3084: note = Description of Artificial Sequence: Synthetic polynucleotide
  source 1..3084: mol_type = other DNA
atgagatttccttcaatttttactgctgttttattcgcagcatcctccgcattagctgctccagtcaacactacaacagaagatgaaacggcacaaattccggctgaagctgtcatcggttactcagatttagaaggggatttcgatgttgctgttttgccattttccaacagcacaaataacgggttattgtttataaatactactattgccagcattgctgctaaagaagaaggggtatctctcgagaaaagagaggctgaagcaggtgccggatctggtcaaggtggttacggtggccagggaggactgggaggttatggacaaggtgccggtgccggcgctgcagcaggagcctcaggctcaggctctggtggcgctggtcaaggaggtttaggcggttacggccaaggtgctggtgcaggtgcggctgcagcggctgcaggagctagcggagccggccaaggaggattcggaccatatggttcctcttatcaaagtagtacatcttactcagttacttctcagggagctgctggtggactcggtggatatggtcagggttccggcgctggagccgcagctgccggtgcggcaggacaaggtggtcaaggaggatatggccaaggtgcaggagcgggtgctggagcaggtgctggacaaggtggcctgggtggatacggtcaaggtgccggttcatctgctgcatctgctgccgctgcaggtgccggatctggtcaaggtggttacggtggccagggaggactgggaggttatggacaaggtgccggtgccggcgctgcagcaggagcctcaggctcaggctctggtggcgctggtcaaggaggtttaggcggttacggccaaggtgctggtgcaggtgcggctgcagcggctgcaggagctagcggagccggccaaggaggattcggaccatatggttcctcttatcaaagtagtacatcttactcagttacttctcagggagctgctggtggactcggtggatatggtcagggttccggcgctggagccgcagctgccggtgcggcaggacaaggtggtcaaggaggatatggccaaggtgcaggagcgggtgctggagcaggtgctggacaaggtggcctgggtggatacggtcaaggtgccggttcatctgctgcatctgctgccgctgcaggtgccggatctggtcaaggtggttacggtggccagggaggactgggaggttatggacaaggtgccggtgccggcgctgcagcaggagcctcaggctcaggctctggtggcgctggtcaaggaggtttaggcggttacggccaaggtgctggtgcaggtgcggctgcagcggctgcaggagctagcggagccggccaaggaggattcggaccatatggttcctcttatcaaagtagtacatcttactcagttacttctcagggagctgctggtggactcggtggatatggtcagggttccggcgctggagccgcagctgccggtgcggcaggacaaggtggtcaaggaggatatggccaaggtgcaggagcgggtgctggagcaggtgctggacaaggtggcctgggtggatacggtcaaggtgccggttcatctgctgcatctgctgccgctgcaggtgccggatctggtcaaggtggttacggtggccagggaggactgggaggttatggacaaggtgccggtgccggcgctgcagcaggagcctcaggctcaggctctggtggcgctggtcaaggaggtttaggcggttacggccaaggtgctggtgcaggtgcggctgcagcggctgcaggagctagcggagccggccaaggaggattcggaccatatggttcctcttatcaaagtagtacatcttactcagttacttctcagggagctgctggtggactcggtggatatggtcagggttccggcgctggagccgcagctgccggtgcggcaggacaaggtggtcaaggaggatatggccaaggtgcaggagcgggtgctggagcaggtgctggacaaggtggcctgggtggatacggtcaaggtgccggttcatctgctgcatctgctgccgctgcaggtgccggatctggtcaaggtggttacggtggccagggaggactgggaggttatggacaaggtgccggtgccggcgctgcagcaggagcctcaggctcaggctctggtggcgctggtcaaggaggtttaggcggttacggccaaggtgctggtgcaggtgcggctgcagcggctgcaggagctagcggagccggccaaggaggattcggaccatatggttcctcttatcaaagtagtacatcttactcagttacttctcagggagctgctggtggactcggtggatatggtcagggttccggcgctggagccgcagctgccggtgcggcaggacaaggtggtcaaggaggatatggccaaggtgcaggagcgggtgctggagcaggtgctggacaaggtggcctgggtggatacggtcaaggtgccggttcatctgctgcatctgctgccgctgcaggtgccggatctggtcaaggtggttacggtggccagggaggactgggaggttatggacaaggtgccggtgccggcgctgcagcaggagcctcaggctcaggctctggtggcgctggtcaaggaggtttaggcggttacggccaaggtgctggtgcaggtgcggctgcagcggctgcaggagctagcggagccggccaaggaggattcggaccatatggttcctcttatcaaagtagtacatcttactcagttacttctcagggagctgctggtggactcggtggatatggtcagggttccggcgctggagccgcagctgccggtgcggcaggacaaggtggtcaaggaggatatggccaaggtgcaggagcgggtgctggagcaggtgctggacaaggtggcctgggtggatacggtcaaggtgccggttcatctgctgcatctgctgccgctgcaggtgactacaaagatgacgacgataaagattacaaagacgatgacgataaggactataaagatgatgacgacaaataataa

SEQ ID NO: 2727 - DNA, 2868 bp, synthetic construct
  misc_feature 1..2868: note = Description of Artificial Sequence: Synthetic polynucleotide
  source 1..2868: mol_type = other DNA
atgagatttccttcaatttttactgctgttttattcgcagcatcctccgcattagctgctccagtcaacactacaacagaagatgaaacggcacaaattccggctgaagctgtcatcggttactcagatttagaaggggatttcgatgttgctgttttgccattttccaacagcacaaataacgggttattgtttataaatactactattgccagcattgctgctaaagaagaaggggtatctctcgagaaaagagaggctgaagcaggtgcaggagctggatacggaggtcaagtcggttacggccagggtgctggcgcctcagcaggtgccgccgcagctggagccggcgccggatatggaggacaggctggttacggacaaggagccggtggatccgctggtgcagcagcagctggcgctggtgctggtagacaagcaggttacggtcagggtgcaggagcatctgctcgtgcagcagccgctggagctggcacgggatatggtcagggtgccggtgcatccgctggagccgcagcagctggtgctggtgctggttcccaggtgggatacggacaaggtgctggtgcatcctccggtgctgctgctgctgcgggtgctggtgcaggatacggcggtcaagttggttacgagcaaggcgcaggagcttcagctggagctgaagccgcagcttcatcagctggtgccggatatggtggtcaggccggttatggacaaggcgctggcgcctctgcaggtgcagcagccgcaggtgcaggagctggatacggaggtcaagtcggttacggccagggtgctggcgcctcagcaggtgccgccgcagctggagccggcgccggatatggaggacaggctggttacggacaaggagccggtggatccgctggtgcagcagcagctggcgctggtgctggtagacaagcaggttacggtcagggtgcaggagcatctgctcgtgcagcagccgctggagctggcacgggatatggtcagggtgccggtgcatccgctggagccgcagcagctggtgctggtgctggttcccaggtgggatacggacaaggtgctggtgcatcctccggtgctgctgctgctgcgggtgctggtgcaggatacggcggtcaagttggttacgagcaaggcgcaggagcttcagctggagctgaagccgcagcttcatcagctggtgccggatatggtggtcaggccggttatggacaaggcgctggcgcctctgcaggtgcagcagccgcaggtgcaggagctggatacggaggtcaagtcggttacggccagggtgctggcgcctcagcaggtgccgccgcagctggagccggcgccggatatggaggacaggctggttacggacaaggagccggtggatccgctggtgcagcagcagctggcgctggtgctggtagacaagcaggttacggtcagggtgcaggagcatctgctcgtgcagcagccgctggagctggcacgggatatggtcagggtgccggtgcatccgctggagccgcagcagctggtgctggtgctggttcccaggtgggatacggacaaggtgctggtgcatcctccggtgctgctgctgctgcgggtgctggtgcaggatacggcggtcaagttggttacgagcaaggcgcaggagcttcagctggagctgaagccgcagcttcatcagctggtgccggatatggtggtcaggccggttatggacaaggcgctggcgcctctgcaggtgcagcagccgcaggtgcaggagctggatacggaggtcaagtcggttacggccagggtgctggcgcctcagcaggtgccgccgcagctggagccggcgccggatatggaggacaggctggttacggacaaggagccggtggatccgctggtgcagcagcagctggcgctggtgctggtagacaagcaggttacggtcagggtgcaggagcatctgctcgtgcagcagccgctggagctggcacgggatatggtcagggtgccggtgcatccgctggagccgcagcagctggtgctggtgctggttcccaggtgggatacggacaaggtgctggtgcatcctccggtgctgctgctgctgcgggtgctggtgcaggatacggcggtcaagttggttacgagcaaggcgcaggagcttcagctggagctgaagccgcagcttcatcagctggtgccggatatggtggtcaggccggttatggacaaggcgctggcgcctctgcaggtgcagcagccgcaggtgcaggagctggatacggaggtcaagtcggttacggccagggtgctggcgcctcagcaggtgccgccgcagctggagccggcgccggatatggaggacaggctggttacggacaaggagccggtggatccgctggtgcagcagcagctggcgctggtgctggtagacaagcaggttacggtcagggtgcaggagcatctgctcgtgcagcagccgctggagctggcacgggatatggtcagggtgccggtgcatccgctggagccgcagcagctggtgctggtgctggttcccaggtgggatacggacaaggtgctggtgcatcctccggtgctgctgctgctgcgggtgctggtgcaggatacggcggtcaagttggttacgagcaaggcgcaggagcttcagctggagctgaagccgcagcttcatcagctggtgccggatatggtggtcaggccggttatggacaaggcgctggcgcctctgcaggtgcagcagccgcaggtgactacaaagatgacgacgataaagattacaaagacgatgacgataaggactataaagatgatgacgacaaataataa

SEQ ID NO: 2728 - DNA, 2763 bp, synthetic construct
  misc_feature 1..2763: note = Description of Artificial Sequence: Synthetic polynucleotide
  source 1..2763: mol_type = other DNA
atgagatttccttcaatttttactgctgttttattcgcagcatcctccgcattagctgctccagtcaacactacaacagaagatgaaacggcacaaattccggctgaagctgtcatcggttactcagatttagaaggggatttcgatgttgctgttttgccattttccaacagcacaaataacgggttattgtttataaatactactattgccagcattgctgctaaagaagaaggggtatctctcgagaaaagagaggctgaagcaggtgcaggagccggaggagctggttatggaagaggtgctggagcgggagctggagcagcagcaggagctggtgcaggagctgctgccggagccggtgccggagccggtggttacggaggtcaaggtggttatggcgcaggagccggagccggcgctgcggctgctgccggtgccggtgctggtggcgccgctggctattccagaggtggaagagctggagcagccggtgcaggtgctggagcagcagctggtgctggagccggagctggtggttacggtggacaaggcggttacggtgctggtgcaggagcaggtgctgcggctgcggcaggtgcaggatcaggtggtgccggcggatatggtaggggcgccggtgcaggagcggccgctggtgctggtgcagcagccggcgctggagccggtgctggaggatatggaggtcagggaggttacggtgctggagcaggagccgctgcagcagcaggtgcaggagccggaggagctggttatggaagaggtgctggagcgggagctggagcagcagcaggagctggtgcaggagctgctgccggagccggtgccggagccggtggttacggaggtcaaggtggttatggcgcaggagccggagccggcgctgcggctgctgccggtgccggtgctggtggcgccgctggctattccagaggtggaagagctggagcagccggtgcaggtgctggagcagcagctggtgctggagccggagctggtggttacggtggacaaggcggttacggtgctggtgcaggagcaggtgctgcggctgcggcaggtgcaggatcaggtggtgccggcggatatggtaggggcgccggtgcaggagcggccgctggtgctggtgcagcagccggcgctggagccggtgctggaggatatggaggtcagggaggttacggtgctggagcaggagccgctgcagcagcaggtgcaggagccggaggagctggttatggaagaggtgctggagcgggagctggagcagcagcaggagctggtgcaggagctgctgccggagccggtgccggagccggtggttacggaggtcaaggtggttatggcgcaggagccggagccggcgctgcggctgctgccggtgccggtgctggtggcgccgctggctattccagaggtggaagagctggagcagccggtgcaggtgctggagcagcagctggtgctggagccggagctggtggttacggtggacaaggcggttacggtgctggtgcaggagcaggtgctgcggctgcggcaggtgcaggatcaggtggtgccggcggatatggtaggggcgccggtgcaggagcggccgctggtgctggtgcagcagccggcgctggagccggtgctggaggatatggaggtcagggaggttacggtgctggagcaggagccgctgcagcagcaggtgcaggagccggaggagctggttatggaagaggtgctggagcgggagctggagcagcagcaggagctggtgcaggagctgctgccggagccggtgccggagccggtggttacggaggtcaaggtggttatggcgcaggagccggagccggcgctgcggctgctgccggtgccggtgctggtggcgccgctggctattccagaggtggaagagctggagcagccggtgcaggtgctggagcagcagctggtgctggagccggagctggtggttacggtggacaaggcggttacggtgctggtgcaggagcaggtgctgcggctgcggcaggtgcaggatcaggtggtgccggcggatatggtaggggcgccggtgcaggagcggccgctggtgctggtgcagcagccggcgctggagccggtgctggaggatatggaggtcagggaggttacggtgctggagcaggagccgctgcagcagcaggtgcaggagccggaggagctggttatggaagaggtgctggagcgggagctggagcagcagcaggagctggtgcaggagctgctgccggagccggtgccggagccggtggttacggaggtcaaggtggttatggcgcaggagccggagccggcgctgcggctgctgccggtgccggtgctggtggcgccgctggctattccagaggtggaagagctggagcagccggtgcaggtgctggagcagcagctggtgctggagccggagctggtggttacggtggacaaggcggttacggtgctggtgcaggagcaggtgctgcggctgcggcaggtgcaggatcaggtggtgccggcggatatggtaggggcgccggtgcaggagcggccgctggtgctggtgcagcagccggcgctggagccggtgctggaggatatggaggtcagggaggttacggtgctggagcaggagccgctgcagcagcaggtgactacaaagatgacgacgataaagattacaaagacgatgacgataaggactataaagatgatgacgacaaataataa

SEQ ID NO: 2729 - DNA, 2748 bp, synthetic construct
  misc_feature 1..2748: note = Description of Artificial Sequence: Synthetic polynucleotide
  source 1..2748: mol_type = other DNA
atgagatttccttcaatttttactgctgttttattcgcagcatcctccgcattagctgctccagtcaacactacaacagaagatgaaacggcacaaattccggctgaagctgtcatcggttactcagatttagaaggggatttcgatgttgctgttttgccattttccaacagcacaaataacgggttattgtttataaatactactattgccagcattgctgctaaagaagaaggggtatctctcgagaaaagagaggctgaagcaggtgcaggcgcaggcgctggtggagccggtggttacggtagaggagctggtgccggagccggtgcaggagccggagctgcagcaggacagggatatggttcaggagctggagcaggagccggtgcttctgcaggaggagctggtagttacggaagaggcgcaggagctggagctgcagccgcaagtggagctggtgcaggaggttacggtgccggtcagggatacggcgccggtgccggagccgttgctagcgctgctgccggagctggatcgggtgctggaggcgctggtggatatggtagaggcgccgtagctggatctggtgccggtgctggagccggagcaggtggtgctggaggatacggagcgggagccggtgccggtgctgcagccggcgctgtagccggtggaagtggaggatacggtggtcgtcaaggaggttactccgcaggtgctggcgccggagcagcagccgccgcaggtgcaggcgcaggcgctggtggagccggtggttacggtagaggagctggtgccggagccggtgcaggagccggagctgcagcaggacagggatatggttcaggagctggagcaggagccggtgcttctgcaggaggagctggtagttacggaagaggcgcaggagctggagctgcagccgcaagtggagctggtgcaggaggttacggtgccggtcagggatacggcgccggtgccggagccgttgctagcgctgctgccggagctggatcgggtgctggaggcgctggtggatatggtagaggcgccgtagctggatctggtgccggtgctggagccggagcaggtggtgctggaggatacggagcgggagccggtgccggtgctgcagccggcgctgtagccggtggaagtggaggatacggtggtcgtcaaggaggttactccgcaggtgctggcgccggagcagcagccgccgcaggtgcaggcgcaggcgctggtggagccggtggttacggtagaggagctggtgccggagccggtgcaggagccggagctgcagcaggacagggatatggttcaggagctggagcaggagccggtgcttctgcaggaggagctggtagttacggaagaggcgcaggagctggagctgcagccgcaagtggagctggtgcaggaggttacggtgccggtcagggatacggcgccggtgccggagccgttgctagcgctgctgccggagctggatcgggtgctggaggcgctggtggatatggtagaggcgccgtagctggatctggtgccggtgctggagccggagcaggtggtgctggaggatacggagcgggagccggtgccggtgctgcagccggcgctgtagccggtggaagtggaggatacggtggtcgtcaaggaggttactccgcaggtgctggcgccggagcagcagccgccgcaggtgcaggcgcaggcgctggtggagccggtggttacggtagaggagctggtgccggagccggtgcaggagccggagctgcagcaggacagggatatggttcaggagctggagcaggagccggtgcttctgcaggaggagctggtagttacggaagaggcgcaggagctggagctgcagccgcaagtggagctggtgcaggaggttacggtgccggtcagggatacggcgccggtgccggagccgttgctagcgctgctgccggagctggatcgggtgctggaggcgctggtggatatggtagaggcgccgtagctggatctggtgccggtgctggagccggagcaggtggtgctggaggatacggagcgggagccggtgccggtgctgcagccggcgctgtagccggtggaagtggaggatacggtggtcgtcaaggaggttactccgcaggtgctggcgccggagcagcagccgccgcaggtgcaggcgcaggcgctggtggagccggtggttacggtagaggagctggtgccggagccggtgcaggagccggagctgcagcaggacagggatatggttcaggagctggagcaggagccggtgcttctgcaggaggagctggtagttacggaagaggcgcaggagctggagctgcagccgcaagtggagctggtgcaggaggttacggtgccggtcagggatacggcgccggtgccggagccgttgctagcgctgctgccggagctggatcgggtgctggaggcgctggtggatatggtagaggcgccgtagctggatctggtgccggtgctggagccggagcaggtggtgctggaggatacggagcgggagccggtgccggtgctgcagccggcgctgtagccggtggaagtggaggatacggtggtcgtcaaggaggttactccgcaggtgctggcgccggagcagcagccgccgcaggtgactacaaagatgacgacgataaagattacaaagacgatgacgataaggactataaagatgatgacgacaaataataa

SEQ ID NO: 2730 - DNA, 2148 bp, synthetic construct
  misc_feature 1..2148: note = Description of Artificial Sequence: Synthetic polynucleotide
  source 1..2148: mol_type = other DNA
atgagatttccttcaatttttactgctgttttattcgcagcatcctccgcattagctgctccagtcaacactacaacagaagatgaaacggcacaaattccggctgaagctgtcatcggttactcagatttagaaggggatttcgatgttgctgttttgccattttccaacagcacaaataacgggttattgtttataaatactactattgccagcattgctgctaaagaagaaggggtatctctcgagaaaagagaggctgaagcaggtgctggatcaggcggagccggaggttatggtaggggtgccggtgccggtgccggcgccgccgctggtgcaggagccggtgcaggatcttatggaggacaaggtggttatggtgcgggagctggagcaggtgccgcagctgcagcgggagctggtgctggtgccggtggatacggtcgaggagctggtgccggagctggagctggagccggtgctgctgcaagagcaggagccggagctggaggtgcaggatacggcggccagggtggatatggagccggtgccggtgctggtgctgctgccgctgctggcgctggcgccggtggtgcaggaggatacggtagaggagcaggtgcaggtgctggtgctgcagcaggtgctggagccggagcaggtggttacggtggacaaagcggctacggtgcaggagcaggtgcagctgctgcagcaggtgctggatcaggcggagccggaggttatggtaggggtgccggtgccggtgccggcgccgccgctggtgcaggagccggtgcaggatcttatggaggacaaggtggttatggtgcgggagctggagcaggtgccgcagctgcagcgggagctggtgctggtgccggtggatacggtcgaggagctggtgccggagctggagctggagccggtgctgctgcaagagcaggagccggagctggaggtgcaggatacggcggccagggtggatatggagccggtgccggtgctggtgctgctgccgctgctggcgctggcgccggtggtgcaggaggatacggtagaggagcaggtgcaggtgctggtgctgcagcaggtgctggagccggagcaggtggttacggtggacaaagcggctacggtgcaggagcaggtgcagctgctgcagcaggtgctggatcaggcggagccggaggttatggtaggggtgccggtgccggtgccggcgccgccgctggtgcaggagccggtgcaggatcttatggaggacaaggtggttatggtgcgggagctggagcaggtgccgcagctgcagcgggagctggtgctggtgccggtggatacggtcgaggagctggtgccggagctggagctggagccggtgctgctgcaagagcaggagccggagctggaggtgcaggatacggcggccagggtggatatggagccggtgccggtgctggtgctgctgccgctgctggcgctggcgccggtggtgcaggaggatacggtagaggagcaggtgcaggtgctggtgctgcagcaggtgctggagccggagcaggtggttacggtggacaaagcggctacggtgcaggagcaggtgcagctgctgcagcaggtgctggatcaggcggagccggaggttatggtaggggtgccggtgccggtgccggcgccgccgctggtgcaggagccggtgcaggatcttatggaggacaaggtggttatggtgcgggagctggagcaggtgccgcagctgcagcgggagctggtgctggtgccggtggatacggtcgaggagctggtgccggagctggagctggagccggtgctgctgcaagagcaggagccggagctggaggtgcaggatacggcggccagggtggatatggagccggtgccggtgctggtgctgctgccgctgctggcgctggcgccggtggtgcaggaggatacggtagaggagcaggtgcaggtgctggtgctgcagcaggtgctggagccggagcaggtggttacggtggacaaagcggctacggtgcaggagcaggtgcagctgctgcagcaggtgactacaaagatgacgacgataaagattacaaagacgatgacgataaggactataaagatgatgacgacaaataataa

SEQ ID NO: 2731 - DNA, 2220 bp, synthetic construct
  misc_feature 1..2220: note = Description of Artificial Sequence: Synthetic polynucleotide
  source 1..2220: mol_type = other DNA
atgagatttccttcaatttttactgctgttttattcgcagcatcctccgcattagctgctccagtcaacactacaacagaagatgaaacggcacaaattccggctgaagctgtcatcggttactcagatttagaaggggatttcgatgttgctgttttgccattttccaacagcacaaataacgggttattgtttataaatactactattgccagcattgctgctaaagaagaaggggtatctctcgagaaaagagaggctgaagcaggtacaggaggagttggtggattgttcctatccagcggtgactttggacgaggtggtgctggagctggcgctggtgcggccgccgctagcgcagctgccgcatctagcgcagctgctggtgctagaggaggttccggattcggtgttggtacaggcggttttggacgtggcggagccggagcgggtactggtgctgctgctgccagtgcagccgccgcctctgctgcggctgcaggagctggtggagatggtggcctattcctgagtagtggagattttggacgtggaggagcgggcgctggcgctggagctgccgcagcctctgctgctgccgcatcatctgccgccgcaggagcacgtggtggatcaggattcggagttggaacgggcggatttggcagaggtggagcaggagatggagcttcagcagcggcggcatcggcagcagcagcttcagctgctgctgcaggtacaggaggagttggtggattgttcctatccagcggtgactttggacgaggtggtgctggagctggcgctggtgcggccgccgctagcgcagctgccgcatctagcgcagctgctggtgctagaggaggttccggattcggtgttggtacaggcggttttggacgtggcggagccggagcgggtactggtgctgctgctgccagtgcagccgccgcctctgctgcggctgcaggagctggtggagatggtggcctattcctgagtagtggagattttggacgtggaggagcgggcgctggcgctggagctgccgcagcctctgctgctgccgcatcatctgccgccgcaggagcacgtggtggatcaggattcggagttggaacgggcggatttggcagaggtggagcaggagatggagcttcagcagcggcggcatcggcagcagcagcttcagctgctgctgcaggtacaggaggagttggtggattgttcctatccagcggtgactttggacgaggtggtgctggagctggcgctggtgcggccgccgctagcgcagctgccgcatctagcgcagctgctggtgctagaggaggttccggattcggtgttggtacaggcggttttggacgtggcggagccggagcgggtactggtgctgctgctgccagtgcagccgccgcctctgctgcggctgcaggagctggtggagatggtggcctattcctgagtagtggagattttggacgtggaggagcgggcgctggcgctggagctgccgcagcctctgctgctgccgcatcatctgccgccgcaggagcacgtggtggatcaggattcggagttggaacgggcggatttggcagaggtggagcaggagatggagcttcagcagcggcggcatcggcagcagcagcttcagctgctgctgcaggtacaggaggagttggtggattgttcctatccagcggtgactttggacgaggtggtgctggagctggcgctggtgcggccgccgctagcgcagctgccgcatctagcgcagctgctggtgctagaggaggttccggattcggtgttggtacaggcggttttggacgtggcggagccggagcgggtactggtgctgctgctgccagtgcagccgccgcctctgctgcggctgcaggagctggtggagatggtggcctattcctgagtagtggagattttggacgtggaggagcgggcgctggcgctggagctgccgcagcctctgctgctgccgcatcatctgccgccgcaggagcacgtggtggatcaggattcggagttggaacgggcggatttggcagaggtggagcaggagatggagcttcagcagcggcggcatcggcagcagcagcttcagctgctgctgcaggtgactacaaagatgacgacgataaagattacaaagacgatgacgataaggactataaagatgatgacgacaaataataa

SEQ ID NO: 2732 - DNA, 2472 bp, synthetic construct
  misc_feature 1..2472: note = Description of Artificial Sequence: Synthetic polynucleotide
  source 1..2472: mol_type = other DNA
atgagatttccttcaatttttactgctgttttattcgcagcatcctccgcattagctgctccagtcaacactacaacagaagatgaaacggcacaaattccggctgaagctgtcatcggttactcagatttagaaggggatttcgatgttgctgttttgccattttccaacagcacaaataacgggttattgtttataaatactactattgccagcattgctgctaaagaagaaggggtatctctcgagaaaagagaggctgaagcaggtggtgcgggtcaaggcggttacggaggattaggaggtcaaggagccggtgctgctgctgccgctgcaggaggagccggacagggaggttacggtggtcaaggtgccggacaaggagcggctgccgctgcagcatcaggtgctggtcaaggaggctatgaaggtcctggtgcaggacaaggagctggtgctgcagctgccgcagccggtggtgccggccagggaggatatggtggtttgggcggacagggcgccggccaaggagctggtgcagccgcagccgccgctggcggtgccggacaaggtggttacggtggtcttggtggtcagggagcaggtcagggtgcaggagccgctgctgctgctgctggaggagctggtcaaggcggatatggaggtcaaggcgcaggtcaaggcgcagcagcagcagccgctggtggagccggacagggtggttacggcggcctaggttcaggacaaggaggttatggacgtcagggagctggtgccgcagccgcagcggccgctgcaggtggtgcgggtcaaggcggttacggaggattaggaggtcaaggagccggtgctgctgctgccgctgcaggaggagccggacagggaggttacggtggtcaaggtgccggacaaggagcggctgccgctgcagcatcaggtgctggtcaaggaggctatgaaggtcctggtgcaggacaaggagctggtgctgcagctgccgcagccggtggtgccggccagggaggatatggtggtttgggcggacagggcgccggccaaggagctggtgcagccgcagccgccgctggcggtgccggacaaggtggttacggtggtcttggtggtcagggagcaggtcagggtgcaggagccgctgctgctgctgctggaggagctggtcaaggcggatatggaggtcaaggcgcaggtcaaggcgcagcagcagcagccgctggtggagccggacagggtggttacggcggcctaggttcaggacaaggaggttatggacgtcagggagctggtgccgcagccgcagcggccgctgcaggtggtgcgggtcaaggcggttacggaggattaggaggtcaaggagccggtgctgctgctgccgctgcaggaggagccggacagggaggttacggtggtcaaggtgccggacaaggagcggctgccgctgcagcatcaggtgctggtcaaggaggctatgaaggtcctggtgcaggacaaggagctggtgctgcagctgccgcagccggtggtgccggccagggaggatatggtggtttgggcggacagggcgccggccaaggagctggtgcagccgcagccgccgctggcggtgccggacaaggtggttacggtggtcttggtggtcagggagcaggtcagggtgcaggagccgctgctgctgctgctggaggagctggtcaaggcggatatggaggtcaaggcgcaggtcaaggcgcagcagcagcagccgctggtggagccggacagggtggttacggcggcctaggttcaggacaaggaggttatggacgtcagggagctggtgccgcagccgcagcggccgctgcaggtggtgcgggtcaaggcggttacggaggattaggaggtcaaggagccggtgctgctgctgccgctgcaggaggagccggacagggaggttacggtggtcaaggtgccggacaaggagcggctgccgctgcagcatcaggtgctggtcaaggaggctatgaaggtcctggtgcaggacaaggagctggtgctgcagctgccgcagccggtggtgccggccagggaggatatggtggtttgggcggacagggcgccggccaaggagctggtgcagccgcagccgccgctggcggtgccggacaaggtggttacggtggtcttggtggtcagggagcaggtcagggtgcaggagccgctgctgctgctgctggaggagctggtcaaggcggatatggaggtcaaggcgcaggtcaaggcgcagcagcagcagccgctggtggagccggacagggtggttacggcggcctaggttcaggacaaggaggttatggacgtcagggagctggtgccgcagccgcagcggccgctgcaggtgactacaaagatgacgacgataaagattacaaagacgatgacgataaggactataaagatgatgacgacaaataataa

SEQ ID NO: 2733 - DNA, 2052 bp, synthetic construct
  misc_feature 1..2052: note = Description of Artificial Sequence: Synthetic polynucleotide
  source 1..2052: mol_type = other DNA
atgagatttccttcaatttttactgctgttttattcgcagcatcctccgcattagctgctccagtcaacactacaacagaagatgaaacggcacaaattccggctgaagctgtcatcggttactcagatttagaaggggatttcgatgttgctgttttgccattttccaacagcacaaataacgggttattgtttataaatactactattgccagcattgctgctaaagaagaaggggtatctctcgagaaaagagaggctgaagcaggtgctggcgctggagctggagtaggtgtgggcggtgcaggcggttacggtcagggttacggtgctggagctggagcaggagctggagctggagctggtgcaggtggagctggaggttacggccagggttatggagctggtgcagcagctgctgctggagctggtgctggtgcagctggtggctacggaggaggttcaggagcgggtgctggtggtgctggaggttatggtcaaggatacggtgcaggttctggagccggtgcgggagccgctgcagcggccggtgcatctgctggagccgctggtggctatggtggaggagctggagttggtgctggagctggcgctggtgctgcaggtggttacggccaatcatacggatcaggtgctggagcaggtgcaggagcaggtgctgctgctgccgcaggtgctggcgctggagctggagtaggtgtgggcggtgcaggcggttacggtcagggttacggtgctggagctggagcaggagctggagctggagctggtgcaggtggagctggaggttacggccagggttatggagctggtgcagcagctgctgctggagctggtgctggtgcagctggtggctacggaggaggttcaggagcgggtgctggtggtgctggaggttatggtcaaggatacggtgcaggttctggagccggtgcgggagccgctgcagcggccggtgcatctgctggagccgctggtggctatggtggaggagctggagttggtgctggagctggcgctggtgctgcaggtggttacggccaatcatacggatcaggtgctggagcaggtgcaggagcaggtgctgctgctgccgcaggtgctggcgctggagctggagtaggtgtgggcggtgcaggcggttacggtcagggttacggtgctggagctggagcaggagctggagctggagctggtgcaggtggagctggaggttacggccagggttatggagctggtgcagcagctgctgctggagctggtgctggtgcagctggtggctacggaggaggttcaggagcgggtgctggtggtgctggaggttatggtcaaggatacggtgcaggttctggagccggtgcgggagccgctgcagcggccggtgcatctgctggagccgctggtggctatggtggaggagctggagttggtgctggagctggcgctggtgctgcaggtggttacggccaatcatacggatcaggtgctggagcaggtgcaggagcaggtgctgctgctgccgcaggtgctggcgctggagctggagtaggtgtgggcggtgcaggcggttacggtcagggttacggtgctggagctggagcaggagctggagctggagctggtgcaggtggagctggaggttacggccagggttatggagctggtgcagcagctgctgctggagctggtgctggtgcagctggtggctacggaggaggttcaggagcgggtgctggtggtgctggaggttatggtcaaggatacggtgcaggttctggagccggtgcgggagccgctgcagcggccggtgcatctgctggagccgctggtggctatggtggaggagctggagttggtgctggagctggcgctggtgctgcaggtggttacggccaatcatacggatcaggtgctggagcaggtgcaggagcaggtgctgctgctgccgcaggtgactacaaagatgacgacgataaagattacaaagacgatgacgataaggactataaagatgatgacgacaaataataa

SEQ ID NO: 2734 - protein, 866 aa, synthetic construct
  REGION 1..866: note = Description of Artificial Sequence: Synthetic polypeptide
MRFPSIFTAVLFAASSALAAPVNTTTEDETAQIPAEAVIGYSDLEGDFDVAVLPFSNSTNNGLLFINTTIASIAAKEEGVSLEKREAEAGGAGQRGYGGLGNQGAGRGGLGGQGAGAAAAAAAGGAGQGGYGGLGNQGAGRGGQGAAAAAGGAGQGGYGGLGSQGAGRGGQGAGAAAAAAVGAGQEGIRGQGAGQGGYGGLGSQGSGRGGLGGQGAGAAAAAAGGAGQGGLGGQGAGQGAGAAAAAAGGVRQGGYGGLGSQGAGRGGQGAGAAAAAAGGAGQRGYGGLGNQGAGRGGLGGQGAGAAAAAAAGGAGQGGYGGLGNQGAGRGGQGAAAAAGGAGQGGYGGLGSQGAGRGGQGAGAAAAAAVGAGQEGIRGQGAGQGGYGGLGSQGSGRGGLGGQGAGAAAAAAGGAGQGGLGGQGAGQGAGAAAAAAGGVRQGGYGGLGSQGAGRGGQGAGAAAAAAGGAGQRGYGGLGNQGAGRGGLGGQGAGAAAAAAAGGAGQGGYGGLGNQGAGRGGQGAAAAAGGAGQGGYGGLGSQGAGRGGQGAGAAAAAAVGAGQEGIRGQGAGQGGYGGLGSQGSGRGGLGGQGAGAAAAAAGGAGQGGLGGQGAGQGAGAAAAAAGGVRQGGYGGLGSQGAGRGGQGAGAAAAAAGGAGQRGYGGLGNQGAGRGGLGGQGAGAAAAAAAGGAGQGGYGGLGNQGAGRGGQGAAAAAGGAGQGGYGGLGSQGAGRGGQGAGAAAAAAVGAGQEGIRGQGAGQGGYGGLGSQGSGRGGLGGQGAGAAAAAAGGAGQGGLGGQGAGQGAGAAAAAAGGVRQGGYGGLGSQGAGRGGQGAGAAAAAAGDYKDDDDKDYKDDDDKDYKDDDDK

SEQ ID NO: 2735 - protein, 1086 aa, synthetic construct
  REGION 1..1086: note = Description of Artificial Sequence: Synthetic polypeptide
MRFPSIFTAVLFAASSALAAPVNTTTEDETAQIPAEAVIGYSDLEGDFDVAVLPFSNSTNNGLLFINTTIASIAAKEEGVSLEKREAEAGSGAGQGTGAGAGAAAAAAGAAGSGAGQGAGSGAGAAAAAAAASAAGAGQGAGSGSGAGAAAAAAAAAGAGQGAGSGSGAGAAAAAAAAAAAAQQQQQQQAAAAAAAAAAAAAGSGQGASFGVTQQFGAPSGAASSAAAAAAAAAAAAAGSGAGQEAGTGAGAAAAAAAAGAAGSGAGQGAGSGAGAAAAAAAAASAAGAGQGAGSGSGAGAAAAAAAAAAAAQQQQQQQAAAAAAAAAAAAAGSGAGQGTGAGAGAAAAAAGAAGSGAGQGAGSGAGAAAAAAAASAAGAGQGAGSGSGAGAAAAAAAAAGAGQGAGSGSGAGAAAAAAAAAAAAQQQQQQQAAAAAAAAAAAAAGSGQGASFGVTQQFGAPSGAASSAAAAAAAAAAAAAGSGAGQEAGTGAGAAAAAAAAGAAGSGAGQGAGSGAGAAAAAAAAASAAGAGQGAGSGSGAGAAAAAAAAAAAAQQQQQQQAAAAAAAAAAAAAGSGAGQGTGAGAGAAAAAAGAAGSGAGQGAGSGAGAAAAAAAASAAGAGQGAGSGSGAGAAAAAAAAAGAGQGAGSGSGAGAAAAAAAAAAAAQQQQQQQAAAAAAAAAAAAAGSGQGASFGVTQQFGAPSGAASSAAAAAAAAAAAAAGSGAGQEAGTGAGAAAAAAAAGAAGSGAGQGAGSGAGAAAAAAAAASAAGAGQGAGSGSGAGAAAAAAAAAAAAQQQQQQQAAAAAAAAAAAAAGSGAGQGTGAGAGAAAAAAGAAGSGAGQGAGSGAGAAAAAAAASAAGAGQGAGSGSGAGAAAAAAAAAGAGQGAGSGSGAGAAAAAAAAAAAAQQQQQQQAAAAAAAAAAAAAGSGQGASFGVTQQFGAPSGAASSAAAAAAAAAAAAAGSGAGQEAGTGAGAAAAAAAAGAAGSGAGQGAGSGAGAAAAAAAAASAAGAGQGAGSGSGAGAAAAAAAAAAAAQQQQQQQAAAAAAAAAAAAAGDYKDDDDKDYKDDDDKDYKDDDDK

SEQ ID NO: 2736 - protein, 1026 aa, synthetic construct
  REGION 1..1026: note = Description of Artificial Sequence: Synthetic polypeptide
MRFPSIFTAVLFAASSALAAPVNTTTEDETAQIPAEAVIGYSDLEGDFDVAVLPFSNSTNNGLLFINTTIASIAAKEEGVSLEKREAEAGAGSGQGGYGGQGGLGGYGQGAGAGAAAGASGSGSGGAGQGGLGGYGQGAGAGAAAAAAGASGAGQGGFGPYGSSYQSSTSYSVTSQGAAGGLGGYGQGSGAGAAAAGAAGQGGQGGYGQGAGAGAGAGAGQGGLGGYGQGAGSSAASAAAAGAGSGQGGYGGQGGLGGYGQGAGAGAAAGASGSGSGGAGQGGLGGYGQGAGAGAAAAAAGASGAGQGGFGPYGSSYQSSTSYSVTSQGAAGGLGGYGQGSGAGAAAAGAAGQGGQGGYGQGAGAGAGAGAGQGGLGGYGQGAGSSAASAAAAGAGSGQGGYGGQGGLGGYGQGAGAGAAAGASGSGSGGAGQGGLGGYGQGAGAGAAAAAAGASGAGQGGFGPYGSSYQSSTSYSVTSQGAAGGLGGYGQGSGAGAAAAGAAGQGGQGGYGQGAGAGAGAGAGQGGLGGYGQGAGSSAASAAAAGAGSGQGGYGGQGGLGGYGQGAGAGAAAGASGSGSGGAGQGGLGGYGQGAGAGAAAAAAGASGAGQGGFGPYGSSYQSSTSYSVTSQGAAGGLGGYGQGSGAGAAAAGAAGQGGQGGYGQGAGAGAGAGAGQGGLGGYGQGAGSSAASAAAAGAGSGQGGYGGQGGLGGYGQGAGAGAAAGASGSGSGGAGQGGLGGYGQGAGAGAAAAAAGASGAGQGGFGPYGSSYQSSTSYSVTSQGAAGGLGGYGQGSGAGAAAAGAAGQGGQGGYGQGAGAGAGAGAGQGGLGGYGQGAGSSAASAAAAGAGSGQGGYGGQGGLGGYGQGAGAGAAAGASGSGSGGAGQGGLGGYGQGAGAGAAAAAAGASGAGQGGFGPYGSSYQSSTSYSVTSQGAAGGLGGYGQGSGAGAAAAGAAGQGGQGGYGQGAGAGAGAGAGQGGLGGYGQGAGSSAASAAAAGDYKDDDDKDYKDDDDKDYKDDDDK

SEQ ID NO: 2737 - protein, 954 aa, synthetic construct
  REGION 1..954: note = Description of Artificial Sequence: Synthetic polypeptide
MRFPSIFTAVLFAASSALAAPVNTTTEDETAQIPAEAVIGYSDLEGDFDVAVLPFSNSTNNGLLFINTTIASIAAKEEGVSLEKREAEAGAGAGYGGQVGYGQGAGASAGAAAAGAGAGYGGQAGYGQGAGGSAGAAAAGAGAGRQAGYGQGAGASARAAAAGAGTGYGQGAGASAGAAAAGAGAGSQVGYGQGAGASSGAAAAAGAGAGYGGQVGYEQGAGASAGAEAAASSAGAGYGGQAGYGQGAGASAGAAAAGAGAGYGGQVGYGQGAGASAGAAAAGAGAGYGGQAGYGQGAGGSAGAAAAGAGAGRQAGYGQGAGASARAAAAGAGTGYGQGAGASAGAAAAGAGAGSQVGYGQGAGASSGAAAAAGAGAGYGGQVGYEQGAGASAGAEAAASSAGAGYGGQAGYGQGAGASAGAAAAGAGAGYGGQVGYGQGAGASAGAAAAGAGAGYGGQAGYGQGAGGSAGAAAAGAGAGRQAGYGQGAGASARAAAAGAGTGYGQGAGASAGAAAAGAGAGSQVGYGQGAGASSGAAAAAGAGAGYGGQVGYEQGAGASAGAEAAASSAGAGYGGQAGYGQGAGASAGAAAAGAGAGYGGQVGYGQGAGASAGAAAAGAGAGYGGQAGYGQGAGGSAGAAAAGAGAGRQAGYGQGAGASARAAAAGAGTGYGQGAGASAGAAAAGAGAGSQVGYGQGAGASSGAAAAAGAGAGYGGQVGYEQGAGASAGAEAAASSAGAGYGGQAGYGQGAGASAGAAAAGAGAGYGGQVGYGQGAGASAGAAAAGAGAGYGGQAGYGQGAGGSAGAAAAGAGAGRQAGYGQGAGASARAAAAGAGTGYGQGAGASAGAAAAGAGAGSQVGYGQGAGASSGAAAAAGAGAGYGGQVGYEQGAGASAGAEAAASSAGAGYGGQAGYGQGAGASAGAAAAGDYKDDDDKDYKDDDDKDYKDDDDK

SEQ ID NO: 2738 - protein, 919 aa, synthetic construct
  REGION 1..919: note = Description of Artificial Sequence: Synthetic polypeptide
MRFPSIFTAVLFAASSALAAPVNTTTEDETAQIPAEAVIGYSDLEGDFDVAVLPFSNSTNNGLLFINTTIASIAAKEEGVSLEKREAEAGAGAGGAGYGRGAGAGAGAAAGAGAGAAAGAGAGAGGYGGQGGYGAGAGAGAAAAAGAGAGGAAGYSRGGRAGAAGAGAGAAAGAGAGAGGYGGQGGYGAGAGAGAAAAAGAGSGGAGGYGRGAGAGAAAGAGAAAGAGAGAGGYGGQGGYGAGAGAAAAAGAGAGGAGYGRGAGAGAGAAAGAGAGAAAGAGAGAGGYGGQGGYGAGAGAGAAAAAGAGAGGAAGYSRGGRAGAAGAGAGAAAGAGAGAGGYGGQGGYGAGAGAGAAAAAGAGSGGAGGYGRGAGAGAAAGAGAAAGAGAGAGGYGGQGGYGAGAGAAAAAGAGAGGAGYGRGAGAGAGAAAGAGAGAAAGAGAGAGGYGGQGGYGAGAGAGAAAAAGAGAGGAAGYSRGGRAGAAGAGAGAAAGAGAGAGGYGGQGGYGAGAGAGAAAAAGAGSGGAGGYGRGAGAGAAAGAGAAAGAGAGAGGYGGQGGYGAGAGAAAAAGAGAGGAGYGRGAGAGAGAAAGAGAGAAAGAGAGAGGYGGQGGYGAGAGAGAAAAAGAGAGGAAGYSRGGRAGAAGAGAGAAAGAGAGAGGYGGQGGYGAGAGAGAAAAAGAGSGGAGGYGRGAGAGAAAGAGAAAGAGAGAGGYGGQGGYGAGAGAAAAAGAGAGGAGYGRGAGAGAGAAAGAGAGAAAGAGAGAGGYGGQGGYGAGAGAGAAAAAGAGAGGAAGYSRGGRAGAAGAGAGAAAGAGAGAGGYGGQGGYGAGAGAGAAAAAGAGSGGAGGYGRGAGAGAAAGAGAAAGAGAGAGGYGGQGGYGAGAGAAAAAGDYKDDDDKDYKDDDDKDYKDDDDK

SEQ ID NO: 2739 - protein, 914 aa, synthetic construct
  REGION 1..914: note = Description of Artificial Sequence: Synthetic polypeptide
MRFPSIFTAVLFAASSALAAPVNTTTEDETAQIPAEAVIGYSDLEGDFDVAVLPFSNSTNNGLLFINTTIASIAAKEEGVSLEKREAEAGAGAGAGGAGGYGRGAGAGAGAGAGAAAGQGYGSGAGAGAGASAGGAGSYGRGAGAGAAAASGAGAGGYGAGQGYGAGAGAVASAAAGAGSGAGGAGGYGRGAVAGSGAGAGAGAGGAGGYGAGAGAGAAAGAVAGGSGGYGGRQGGYSAGAGAGAAAAAGAGAGAGGAGGYGRGAGAGAGAGAGAAAGQGYGSGAGAGAGASAGGAGSYGRGAGAGAAAASGAGAGGYGAGQGYGAGAGAVASAAAGAGSGAGGAGGYGRGAVAGSGAGAGAGAGGAGGYGAGAGAGAAAGAVAGGSGGYGGRQGGYSAGAGAGAAAAAGAGAGAGGAGGYGRGAGAGAGAGAGAAAGQGYGSGAGAGAGASAGGAGSYGRGAGAGAAAASGAGAGGYGAGQGYGAGAGAVASAAAGAGSGAGGAGGYGRGAVAGSGAGAGAGAGGAGGYGAGAGAGAAAGAVAGGSGGYGGRQGGYSAGAGAGAAAAAGAGAGAGGAGGYGRGAGAGAGAGAGAAAGQGYGSGAGAGAGASAGGAGSYGRGAGAGAAAASGAGAGGYGAGQGYGAGAGAVASAAAGAGSGAGGAGGYGRGAVAGSGAGAGAGAGGAGGYGAGAGAGAAAGAVAGGSGGYGGRQGGYSAGAGAGAAAAAGAGAGAGGAGGYGRGAGAGAGAGAGAAAGQGYGSGAGAGAGASAGGAGSYGRGAGAGAAAASGAGAGGYGAGQGYGAGAGAVASAAAGAGSGAGGAGGYGRGAVAGSGAGAGAGAGGAGGYGAGAGAGAAAGAVAGGSGGYGGRQGGYSAGAGAGAAAAAGDYKDDDDKDYKDDDDKDYKDDDDK

SEQ ID NO: 2740 - protein, 714 aa, synthetic construct
  REGION 1..714: note = Description of Artificial Sequence: Synthetic polypeptide
MRFPSIFTAVLFAASSALAAPVNTTTEDETAQIPAEAVIGYSDLEGDFDVAVLPFSNSTNNGLLFINTTIASIAAKEEGVSLEKREAEAGAGSGGAGGYGRGAGAGAGAAAGAGAGAGSYGGQGGYGAGAGAGAAAAAGAGAGAGGYGRGAGAGAGAGAGAAARAGAGAGGAGYGGQGGYGAGAGAGAAAAAGAGAGGAGGYGRGAGAGAGAAAGAGAGAGGYGGQSGYGAGAGAAAAAGAGSGGAGGYGRGAGAGAGAAAGAGAGAGSYGGQGGYGAGAGAGAAAAAGAGAGAGGYGRGAGAGAGAGAGAAARAGAGAGGAGYGGQGGYGAGAGAGAAAAAGAGAGGAGGYGRGAGAGAGAAAGAGAGAGGYGGQSGYGAGAGAAAAAGAGSGGAGGYGRGAGAGAGAAAGAGAGAGSYGGQGGYGAGAGAGAAAAAGAGAGAGGYGRGAGAGAGAGAGAAARAGAGAGGAGYGGQGGYGAGAGAGAAAAAGAGAGGAGGYGRGAGAGAGAAAGAGAGAGGYGGQSGYGAGAGAAAAAGAGSGGAGGYGRGAGAGAGAAAGAGAGAGSYGGQGGYGAGAGAGAAAAAGAGAGAGGYGRGAGAGAGAGAGAAARAGAGAGGAGYGGQGGYGAGAGAGAAAAAGAGAGGAGGYGRGAGAGAGAAAGAGAGAGGYGGQSGYGAGAGAAAAAGDYKDDDDKDYKDDDDKDYKDDDDK

SEQ ID NO: 2741 - protein, 738 aa, synthetic construct
  REGION 1..738: note = Description of Artificial Sequence: Synthetic polypeptide
MRFPSIFTAVLFAASSALAAPVNTTTEDETAQIPAEAVIGYSDLEGDFDVAVLPFSNSTNNGLLFINTTIASIAAKEEGVSLEKREAEAGTGGVGGLFLSSGDFGRGGAGAGAGAAAASAAAASSAAAGARGGSGFGVGTGGFGRGGAGAGTGAAAASAAAASAAAAGAGGDGGLFLSSGDFGRGGAGAGAGAAAASAAAASSAAAGARGGSGFGVGTGGFGRGGAGDGASAAAASAAAASAAAAGTGGVGGLFLSSGDFGRGGAGAGAGAAAASAAAASSAAAGARGGSGFGVGTGGFGRGGAGAGTGAAAASAAAASAAAAGAGGDGGLFLSSGDFGRGGAGAGAGAAAASAAAASSAAAGARGGSGFGVGTGGFGRGGAGDGASAAAASAAAASAAAAGTGGVGGLFLSSGDFGRGGAGAGAGAAAASAAAASSAAAGARGGSGFGVGTGGFGRGGAGAGTGAAAASAAAASAAAAGAGGDGGLFLSSGDFGRGGAGAGAGAAAASAAAASSAAAGARGGSGFGVGTGGFGRGGAGDGASAAAASAAAASAAAAGTGGVGGLFLSSGDFGRGGAGAGAGAAAASAAAASSAAAGARGGSGFGVGTGGFGRGGAGAGTGAAAASAAAASAAAAGAGGDGGLFLSSGDFGRGGAGAGAGAAAASAAAASSAAAGARGGSGFGVGTGGFGRGGAGDGASAAAASAAAASAAAAGDYKDDDDKDYKDDDDKDYKDDDDK

SEQ ID NO: 2742 - protein, 822 aa, synthetic construct
  REGION 1..822: note = Description of Artificial Sequence: Synthetic polypeptide
MRFPSIFTAVLFAASSALAAPVNTTTEDETAQIPAEAVIGYSDLEGDFDVAVLPFSNSTNNGLLFINTTIASIAAKEEGVSLEKREAEAGGAGQGGYGGLGGQGAGAAAAAAGGAGQGGYGGQGAGQGAAAAAASGAGQGGYEGPGAGQGAGAAAAAAGGAGQGGYGGLGGQGAGQGAGAAAAAAGGAGQGGYGGLGGQGAGQGAGAAAAAAGGAGQGGYGGQGAGQGAAAAAAGGAGQGGYGGLGSGQGGYGRQGAGAAAAAAAAGGAGQGGYGGLGGQGAGAAAAAAGGAGQGGYGGQGAGQGAAAAAASGAGQGGYEGPGAGQGAGAAAAAAGGAGQGGYGGLGGQGAGQGAGAAAAAAGGAGQGGYGGLGGQGAGQGAGAAAAAAGGAGQGGYGGQGAGQGAAAAAAGGAGQGGYGGLGSGQGGYGRQGAGAAAAAAAAGGAGQGGYGGLGGQGAGAAAAAAGGAGQGGYGGQGAGQGAAAAAASGAGQGGYEGPGAGQGAGAAAAAAGGAGQGGYGGLGGQGAGQGAGAAAAAAGGAGQGGYGGLGGQGAGQGAGAAAAAAGGAGQGGYGGQGAGQGAAAAAAGGAGQGGYGGLGSGQGGYGRQGAGAAAAAAAAGGAGQGGYGGLGGQGAGAAAAAAGGAGQGGYGGQGAGQGAAAAAASGAGQGGYEGPGAGQGAGAAAAAAGGAGQGGYGGLGGQGAGQGAGAAAAAAGGAGQGGYGGLGGQGAGQGAGAAAAAAGGAGQGGYGGQGAGQGAAAAAAGGAGQGGYGGLGSGQGGYGRQGAGAAAAAAAAGDYKDDDDKDYKDDDDKDYKDDDDK

SEQ ID NO: 2743 - protein, 682 aa, synthetic construct
  REGION 1..682: note = Description of Artificial Sequence: Synthetic polypeptide
MRFPSIFTAVLFAASSALAAPVNTTTEDETAQIPAEAVIGYSDLEGDFDVAVLPFSNSTNNGLLFINTTIASIAAKEEGVSLEKREAEAGAGAGAGVGVGGAGGYGQGYGAGAGAGAGAGAGAGGAGGYGQGYGAGAAAAAGAGAGAAGGYGGGSGAGAGGAGGYGQGYGAGSGAGAGAAAAAGASAGAAGGYGGGAGVGAGAGAGAAGGYGQSYGSGAGAGAGAGAAAAAGAGAGAGVGVGGAGGYGQGYGAGAGAGAGAGAGAGGAGGYGQGYGAGAAAAAGAGAGAAGGYGGGSGAGAGGAGGYGQGYGAGSGAGAGAAAAAGASAGAAGGYGGGAGVGAGAGAGAAGGYGQSYGSGAGAGAGAGAAAAAGAGAGAGVGVGGAGGYGQGYGAGAGAGAGAGAGAGGAGGYGQGYGAGAAAAAGAGAGAAGGYGGGSGAGAGGAGGYGQGYGAGSGAGAGAAAAAGASAGAAGGYGGGAGVGAGAGAGAAGGYGQSYGSGAGAGAGAGAAAAAGAGAGAGVGVGGAGGYGQGYGAGAGAGAGAGAGAGGAGGYGQGYGAGAAAAAGAGAGAAGGYGGGSGAGAGGAGGYGQGYGAGSGAGAGAAAAAGASAGAAGGYGGGAGVGAGAGAGAAGGYGQSYGSGAGAGAGAGAAAAAGDYKDDDDKDYKDDDDKDYKDDDDK

SEQ ID NO: 2744 - DNA, 5073 bp, synthetic construct
  misc_feature 1..5073: note = Description of Artificial Sequence: Synthetic polynucleotide
  source 1..5073: mol_type = other DNA
atgagatttccttcaatttttactgctgttttattcgcagcatcctccgcattagctgctccagtcaacactacaacagaagatgaaacggcacaaattccggctgaagctgtcatcggttactcagatttagaaggggatttcgatgttgctgttttgccattttccaacagcacaaataacgggttattgtttataaatactactattgccagcattgctgctaaagaagaaggggtatctctcgagaaaagagaggctgaagcaggtggttacggtccaggcgctggtcaacaaggtccaggaagtggtggtcaacaaggacctggcggtcaaggaccctacggtagtggccaacaaggtccaggtggagcaggacagcagggtccgggaggccaaggaccttacggaccaggtgctgctgctgccgccgctgccgctgccggaggttacggtccaggagccggacaacagggtccaggtggagctggacaacaaggtccaggatcacaaggtcctggtggacaaggtccatacggtcctggtgctggtcaacagggaccaggtagtcaaggacctggttcaggtggtcagcagggtccaggaggacagggtccttacggcccttctgccgctgcagcagcagccgctgccgcaggaggatacggacctggtgctggacaacgatctcaaggaccaggaggacaaggtccttatggacctggcgctggccaacaaggacctggttctcagggtccaggttcaggaggccaacaaggcccaggaggtcaaggaccatacggaccatccgctgcggcagctgcagctgctgcaggtggatatggcccaggagccggacaacagggtcctggttcacaaggtccaggatctggtggtcaacagggaccaggcggccagggaccttatggtccaggagccgctgcagcagcagcagctgttggaggttacggccctggtgccggtcaacaaggcccaggatctcagggtcctggatctggaggacaacaaggtcctggaggtcagggtccatacggaccttcagcagcagctgctgctgcagccgctggtggttatggacctggtgctggtcaacaaggaccgggttctcagggtccgggttcaggaggtcagcagggccctggtggacaaggaccttatggacctagtgcggctgcagcagctgccgccgcaggtggttacggtccaggcgctggtcaacaaggtccaggaagtggtggtcaacaaggacctggcggtcaaggaccctacggtagtggccaacaaggtccaggtggagcaggacagcagggtccgggaggccaaggaccttacggaccaggtgctgctgctgccgccgctgccgctgccggaggttacggtccaggagccggacaacagggtccaggtggagctggacaacaaggtccaggatcacaaggtcctggtggacaaggtccatacggtcctggtgctggtcaacagggaccaggtagtcaaggacctggttcaggtggtcagcagggtccaggaggacagggtccttacggcccttctgccgctgcagcagcagccgctgccgcaggaggatacggacctggtgctggacaacgatctcaaggaccaggaggacaaggtccttatggacctggcgctggccaacaaggacctggttctcagggtccaggttcaggaggccaacaaggcccaggaggtcaaggaccatacggaccatccgctgcggcagctgcagctgctgcaggtggatatggcccaggagccggacaacagggtcctggttcacaaggtccaggatctggtggtcaacagggaccaggcggccagggaccttatggtccaggagccgctgcagcagcagcagctgttggaggttacggccctggtgccggtcaacaaggcccaggatctcagggtcctggatctggaggacaacaaggtcctggaggtcagggtccatacggaccttcagcagcagctgctgctgcagccgctggtggttatggacctggtgctggtcaacaaggaccgggttctcagggtccgggttcaggaggtcagcagggccctggtggacaaggaccttatggacctagtgcggctgcagcagctgccgccgcaggtggttacggtccaggcgctggtcaacaaggtccaggaagtggtggtcaacaaggacctggcggtcaaggaccctacggtagtggccaacaaggtccaggtggagcaggacagcagggtccgggaggccaaggaccttacggaccaggtgctgctgctgccgccgctgccgctgccggaggttacggtccaggagccggacaacagggtccaggtggagctggacaacaaggtccaggatcacaaggtcctggtggacaaggtccatacggtcctggtgctggtcaacagggaccaggtagtcaaggacctggttcaggtggtcagcagggtccaggaggacagggtccttacggcccttctgccgctgcagcagcagccgctgccgcaggaggatacggacctggtgctggacaacgatctcaaggaccaggaggacaaggtccttatggacctggcgctggccaacaaggacctggttctcagggtccaggttcaggaggccaacaaggcccaggaggtcaaggaccatacggaccatccgctgcggcagctgcagctgctgcaggtggatatggcccaggagccggacaacagggtcctggttcacaaggtccaggatctggtggtcaacagggaccaggcggccagggaccttatggtccaggagccgctgcagcagcagcagctgttggaggttacggccctggtgccggtcaacaaggcccaggatctcagggtcctggatctggaggacaacaaggtcctggaggtcagggtccatacggaccttcagcagcagctgctgctgcagccgctggtggttatggacctggtgctggtcaacaaggaccgggttctcagggtccgggttcaggaggtcagcagggccctggtggacaaggaccttatggacctagtgcggctgcagcagctgccgccgcaggtggttacggtccaggcgctggtcaacaaggtccaggaagtggtggtcaacaaggacctggcggtcaaggaccctacggtagtggccaacaaggtccaggtggagcaggacagcagggtccgggaggccaaggaccttacggaccaggtgctgctgctgccgccgctgccgctgccggaggttacggtccaggagccggacaacagggtccaggtggagctggacaacaaggtccaggatcacaaggtcctggtggacaaggtccatacggtcctggtgctggtcaacagggaccaggtagtcaaggacctggttcaggtggtcagcagggtccaggaggacagggtccttacggcccttctgccgctgcagcagcagccgctgccgcaggaggatacggacctggtgctggacaacgatctcaaggaccaggaggacaaggtccttatggacctggcgctggccaacaaggacctggttctcagggtccaggttcaggaggccaacaaggcccaggaggtcaaggaccatacggaccatccgctgcggcagctgcagctgctgcaggtggatatggcccaggagccggacaacagggtcctggttcacaaggtccaggatctggtggtcaacagggaccaggcggccagggaccttatggtccaggagccgctgcagcagcagcagctgttggaggttacggccctggtgccggtcaacaaggcccaggatctcagggtcctggatctggaggacaacaaggtcctggaggtcagggtccatacggaccttcagcagcagctgctgctgcagccgctggtggttatggacctggtgctggtcaacaaggaccgggttctcagggtccgggttcaggaggtcagcagggccctggtggacaaggaccttatggacctagtgcggctgcagcagctgccgccgcaggtggttacggtccaggcgctggtcaacaaggtccaggaagtggtggtcaacaaggacctggcggtcaaggaccctacggtagtggccaacaaggtccaggtggagcaggacagcagggtccgggaggccaaggaccttacggaccaggtgctgctgctgccgccgctgccgctgccggaggttacggtccaggagccggacaacagggtccaggtggagctggacaacaaggtccaggatcacaaggtcctggtggacaaggtccatacggtcctggtgctggtcaacagggaccaggtagtcaaggacctggttcaggtggtcagcagggtccaggaggacagggtccttacggcccttctgccgctgcagcagcagccgctgccgcaggaggatacggacctggtgctggacaacgatctcaaggaccaggaggacaaggtccttatggacctggcgctggccaacaaggacctggttctcagggtccaggttcaggaggccaacaaggcccaggaggtcaaggaccatacggaccatccgctgcggcagctgcagctgctgcaggtggatatggcccaggagccggacaacagggtcctggttcacaaggtccaggatctggtggtcaacagggaccaggcggccagggaccttatggtccaggagccgctgcagcagcagcagctgttggaggttacggccctggtgccggtcaacaaggcccaggatctcagggtcctggatctggaggacaacaaggtcctggaggtcagggtccatacggaccttcagcagcagctgctgctgcagccgctggtggttatggacctggtgctggtcaacaaggaccgggttctcagggtccgggttcaggaggtcagcagggccctggtggacaaggaccttatggacctagtgcggctgcagcagctgccgccgcaggtgactacaaagatgacgacgataaagattacaaagacgatgacgataaggactataaagatgatgacgacaaataataa

SEQ ID NO: 2745 - protein, 1689 aa, synthetic construct
  REGION 1..1689: note = Description of Artificial Sequence: Synthetic polypeptide
MRFPSIFTAVLFAASSALAAPVNTTTEDETAQIPAEAVIGYSDLEGDFDVAVLPFSNSTNNGLLFINTTIASIAAKEEGVSLEKREAEAGGYGPGAGQQGPGSGGQQGPGGQGPYGSGQQGPGGAGQQGPGGQGPYGPGAAAAAAAAAGGYGPGAGQQGPGGAGQQGPGSQGPGGQGPYGPGAGQQGPGSQGPGSGGQQGPGGQGPYGPSAAAAAAAAAGGYGPGAGQRSQGPGGQGPYGPGAGQQGPGSQGPGSGGQQGPGGQGPYGPSAAAAAAAAGGYGPGAGQQGPGSQGPGSGGQQGPGGQGPYGPGAAAAAAAVGGYGPGAGQQGPGSQGPGSGGQQGPGGQGPYGPSAAAAAAAAGGYGPGAGQQGPGSQGPGSGGQQGPGGQGPYGPSAAAAAAAAGGYGPGAGQQGPGSGGQQGPGGQGPYGSGQQGPGGAGQQGPGGQGPYGPGAAAAAAAAAGGYGPGAGQQGPGGAGQQGPGSQGPGGQGPYGPGAGQQGPGSQGPGSGGQQGPGGQGPYGPSAAAAAAAAAGGYGPGAGQRSQGPGGQGPYGPGAGQQGPGSQGPGSGGQQGPGGQGPYGPSAAAAAAAAGGYGPGAGQQGPGSQGPGSGGQQGPGGQGPYGPGAAAAAAAVGGYGPGAGQQGPGSQGPGSGGQQGPGGQGPYGPSAAAAAAAAGGYGPGAGQQGPGSQGPGSGGQQGPGGQGPYGPSAAAAAAAAGGYGPGAGQQGPGSGGQQGPGGQGPYGSGQQGPGGAGQQGPGGQGPYGPGAAAAAAAAAGGYGPGAGQQGPGGAGQQGPGSQGPGGQGPYGPGAGQQGPGSQGPGSGGQQGPGGQGPYGPSAAAAAAAAAGGYGPGAGQRSQGPGGQGPYGPGAGQQGPGSQGPGSGGQQGPGGQGPYGPSAAAAAAAAGGYGPGAGQQGPGSQGPGSGGQQGPGGQGPYGPGAAAAAAAVGGYGPGAGQQGPGSQGPGSGGQQGPGGQGPYGPSAAAAAAAAGGYGPGAGQQGPGSQGPGSGGQQGPGGQGPYGPSAAAAAAAAGGYGPGAGQQGPGSGGQQGPGGQGPYGSGQQGPGGAGQQGPGGQGPYGPGAAAAAAAAAGGYGPGAGQQGPGGAGQQGPGSQGPGGQGPYGPGAGQQGPGSQGPGSGGQQGPGGQGPYGPSAAAAAAAAAGGYGPGAGQRSQGPGGQGPYGPGAGQQGPGSQGPGSGGQQGPGGQGPYGPSAAAAAAAAGGYGPGAGQQGPGSQGPGSGGQQGPGGQGPYGPGAAAAAAAVGGYGPGAGQQGPGSQGPGSGGQQGPGGQGPYGPSAAAAAAAAGGYGPGAGQQGPGSQGPGSGGQQGPGGQGPYGPSAAAAAAAAGGYGPGAGQQGPGSGGQQGPGGQGPYGSGQQGPGGAGQQGPGGQGPYGPGAAAAAAAAAGGYGPGAGQQGPGGAGQQGPGSQGPGGQGPYGPGAGQQGPGSQGPGSGGQQGPGGQGPYGPSAAAAAAAAAGGYGPGAGQRSQGPGGQGPYGPGAGQQGPGSQGPGSGGQQGPGGQGPYGPSAAAAAAAAGGYGPGAGQQGPGSQGPGSGGQQGPGGQGPYGPGAAAAAAAVGGYGPGAGQQGPGSQGPGSGGQQGPGGQGPYGPSAAAAAAAAGGYGPGAGQQGPGSQGPGSGGQQGPGGQGPYGPSAAAAAAAAGDYKDDDDKDYKDDDDKDYKDDDDK

SEQ ID NO: 2746 - DNA, 1293 bp, synthetic construct
  misc_feature 1..1293: note = Description of Artificial Sequence: Synthetic polynucleotide
  source 1..1293: mol_type = other DNA
atgagatttccttcaatttttactgctgttttattcgcagcatcctccgcattagctgctccagtcaacactacaacagaagatgaaacggcacaaattccggctgaagctgtcatcggttactcagatttagaaggggatttcgatgttgctgttttgccattttccaacagcacaaataacgggttattgtttataaatactactattgccagcattgctgctaaagaagaaggggtatctctcgagaaaagagaggctgaagcaggtggttacggtccaggcgctggtcaacaaggtccaggaagtggtggtcaacaaggacctggcggtcaaggaccctacggtagtggccaacaaggtccaggtggagcaggacagcagggtccgggaggccaaggaccttacggaccaggtgctgctgctgccgccgctgccgctgccggaggttacggtccaggagccggacaacagggtccaggtggagctggacaacaaggtccaggatcacaaggtcctggtggacaaggtccatacggtcctggtgctggtcaacagggaccaggtagtcaaggacctggttcaggtggtcagcagggtccaggaggacagggtccttacggcccttctgccgctgcagcagcagccgctgccgcaggaggatacggacctggtgctggacaacgatctcaaggaccaggaggacaaggtccttatggacctggcgctggccaacaaggacctggttctcagggtccaggttcaggaggccaacaaggcccaggaggtcaaggaccatacggaccatccgctgcggcagctgcagctgctgcaggtggatatggcccaggagccggacaacagggtcctggttcacaaggtccaggatctggtggtcaacagggaccaggcggccagggaccttatggtccaggagccgctgcagcagcagcagctgttggaggttacggccctggtgccggtcaacaaggcccaggatctcagggtcctggatctggaggacaacaaggtcctggaggtcagggtccatacggaccttcagcagcagctgctgctgcagccgctggtggttatggacctggtgctggtcaacaaggaccgggttctcagggtccgggttcaggaggtcagcagggccctggtggacaaggaccttatggacctagtgcggctgcagcagctgccgccgcaggtgactacaaagatgacgacgataaagattacaaagacgatgacgataaggactataaagatgatgacgacaaataataa

SEQ ID NO: 2747 - DNA, 2238 bp, synthetic construct
  misc_feature 1..2238: note = Description of Artificial Sequence: Synthetic polynucleotide
  source 1..2238: mol_type = other DNA
atgagatttccttcaatttttactgctgttttattcgcagcatcctccgcattagctgctccagtcaacactacaacagaagatgaaacggcacaaattccggctgaagctgtcatcggttactcagatttagaaggggatttcgatgttgctgttttgccattttccaacagcacaaataacgggttattgtttataaatactactattgccagcattgctgctaaagaagaaggggtatctctcgagaaaagagaggctgaagcaggtggttacggtccaggcgctggtcaacaaggtccaggaagtggtggtcaacaaggacctggcggtcaaggaccctacggtagtggccaacaaggtccaggtggagcaggacagcagggtccgggaggccaaggaccttacggaccaggtgctgctgctgccgccgctgccgctgccggaggttacggtccaggagccggacaacagggtccaggtggagctggacaacaaggtccaggatcacaaggtcctggtggacaaggtccatacggtcctggtgctggtcaacagggaccaggtagtcaaggacctggttcaggtggtcagcagggtccaggaggacagggtccttacggcccttctgccgctgcagcagcagccgctgccgcaggaggatacggacctggtgctggacaacgatctcaaggaccaggaggacaaggtccttatggacctggcgctggccaacaaggacctggttctcagggtccaggttcaggaggccaacaaggcccaggaggtcaaggaccatacggaccatccgctgcggcagctgcagctgctgcaggtggatatggcccaggagccggacaacagggtcctggttcacaaggtccaggatctggtggtcaacagggaccaggcggccagggaccttatggtccaggagccgctgcagcagcagcagctgttggaggttacggccctggtgccggtcaacaaggcccaggatctcagggtcctggatctggaggacaacaaggtcctggaggtcagggtccatacggaccttcagcagcagctgctgctgcagccgctggtggttatggacctggtgctggtcaacaaggaccgggttctcagggtccgggttcaggaggtcagcagggccctggtggacaaggaccttatggacctagtgcggctgcagcagctgccgccgcaggtggttacggtccaggcgctggtcaacaaggtccaggaagtggtggtcaacaaggacctggcggtcaaggaccctacggtagtggccaacaaggtccaggtggagcaggacagcagggtccgggaggccaaggaccttacggaccaggtgctgctgctgccgccgctgccgctgccggaggttacggtccaggagccggacaacagggtccaggtggagctggacaacaaggtccaggatcacaaggtcctggtggacaaggtccatacggtcctggtgctggtcaacagggaccaggtagtcaaggacctggttcaggtggtcagcagggtccaggaggacagggtccttacggcccttctgccgctgcagcagcagccgctgccgcaggaggatacggacctggtgctggacaacgatctcaaggaccaggaggacaaggtccttatggacctggcgctggccaacaaggacctggttctcagggtccaggttcaggaggccaacaaggcccaggaggtcaaggaccatacggaccatccgctgcggcagctgcagctgctgcaggtggatatggcccaggagccggacaacagggtcctggttcacaaggtccaggatctggtggtcaacagggaccaggcggccagggaccttatggtccaggagccgctgcagcagcagcagctgttggaggttacggccctggtgccggtcaacaaggcccaggatctcagggtcctggatctggaggacaacaaggtcctggaggtcagggtccatacggaccttcagcagcagctgctgctgcagccgctggtggttatggacctggtgctggtcaacaaggaccgggttctcagggtccgggttcaggaggtcagcagggccctggtggacaaggaccttatggacctagtgcggctgcagcagctgccgccgcaggtgactacaaagatgacgacgataaagattacaaagacgatgacgataaggactataaagatgatgacgacaaataataa

SEQ ID NO: 2748 - DNA, 3183 bp, synthetic construct
  misc_feature 1..3183: note = Description of Artificial Sequence: Synthetic polynucleotide
  source 1..3183: mol_type = other DNA
atgagatttccttcaatttttactgctgttttattcgcagcatcctccgcattagctgctccagtcaacactacaacagaagatgaaacggcacaaattccggctgaagctgtcatcggttactcagatttagaaggggatttcgatgttgctgttttgccattttccaacagcacaaataacgggttattgtttataaatactactattgccagcattgctgctaaagaagaaggggtatctctcgagaaaagagaggctgaagcaggtggttacggtccaggcgctggtcaacaaggtccaggaagtggtggtcaacaaggacctggcggtcaaggaccctacggtagtggccaacaaggtccaggtggagcaggacagcagggtccgggaggccaaggaccttacggaccaggtgctgctgctgccgccgctgccgctgccggaggttacggtccaggagccggacaacagggtccaggtggagctggacaacaaggtccaggatcacaaggtcctggtggacaaggtccatacggtcctggtgctggtcaacagggaccaggtagtcaaggacctggttcaggtggtcagcagggtccaggaggacagggtccttacggcccttctgccgctgcagcagcagccgctgccgcaggaggatacggacctggtgctggacaacgatctcaaggaccaggaggacaaggtccttatggacctggcgctggccaacaaggacctggttctcagggtccaggttcaggaggccaacaaggcccaggaggtcaaggaccatacggaccatccgctgcggcagctgcagctgctgcaggtggatatggcccaggagccggacaacagggtcctggttcacaaggtccaggatctggtggtcaacagggaccaggcggccagggaccttatggtccaggagccgctgcagcagcagcagctgttggaggttacggccctggtgccggtcaacaaggcccaggatctcagggtcctggatctggaggacaacaaggtcctggaggtcagggtccatacggaccttcagcagcagctgctgctgcagccgctggtggttatggacctggtgctggtcaacaaggaccgggttctcagggtccgggttcaggaggtcagcagggccctggtggacaaggaccttatggacctagtgcggctgcagcagctgccgccgcaggtggttacggtccaggcgctggtcaacaaggtccaggaagtggtggtcaacaaggacctggcggtcaaggaccctacggtagtggccaacaaggtccaggtggagcaggacagcagggtccgggaggccaaggaccttacggaccaggtgctgctgctgccgccgctgccgctgccggaggttacggtccaggagccggacaacagggtccaggtggagctggacaacaaggtccaggatcacaaggtcctggtggacaaggtccatacggtcctggtgctggtcaacagggaccaggtagtcaaggacctggttcaggtggtcagcagggtccaggaggacagggtccttacggcccttctgccgctgcagcagcagccgctgccgcaggaggatacggacctggtgctggacaacgatctcaaggaccaggaggacaaggtccttatggacctggcgctggccaacaaggacctggttctcagggtccaggttcaggaggccaacaaggcccaggaggtcaaggaccatacggaccatccgctgcggcagctgcagctgctgcaggtggatatggcccaggagccggacaacagggtcctggttcacaaggtccaggatctggtggtcaacagggaccaggcggccagggaccttatggtccaggagccgctgcagcagcagcagctgttggaggttacggccctggtgccggtcaacaaggcccaggatctcagggtcctggatctggaggacaacaaggtcctggaggtcagggtccatacggaccttcagcagcagctgctgctgcagccgctggtggttatggacctggtgctggtcaacaaggaccgggttctcagggtccgggttcaggaggtcagcagggccctggtggacaaggaccttatggacctagtgcggctgcagcagctgccgccgcaggtggttacggtccaggcgctggtcaacaaggtccaggaagtggtggtcaacaaggacctggcggtcaaggaccctacggtagtggccaacaaggtccaggtggagcaggacagcagggtccgggaggccaaggaccttacggaccaggtgctgctgctgccgccgctgccgctgccggaggttacggtccaggagccggacaacagggtccaggtggagctggacaacaaggtccaggatcacaaggtcctggtggacaaggtccatacggtcctggtgctggtcaacagggaccaggtagtcaaggacctggttcaggtggtcagcagggtccaggaggacagggtccttacggcccttctgccgctgcagcagcagccgctgccgcaggaggatacggacctggtgctggacaacgatctcaaggaccaggaggacaaggtccttatggacctggcgctggccaacaaggacctggttctcagggtccaggttcaggaggccaacaaggcccaggaggtcaaggaccatacggaccatccgctgcggcagctgcagctgctgcaggtggatatggcccaggagccggacaacagggtcctggttcacaaggtccaggatctggtggtcaacagggaccaggcggccagggaccttatggtccaggagccgctgcagcagcagcagctgttggaggttacggccctggtgccggtcaacaaggcccaggatctcagggtcctggatctggaggacaacaaggtcctggaggtcagggtccatacggaccttcagcagcagctgctgctgcagccgctggtggttatggacctggtgctggtcaacaaggaccgggttctcagggtccgggttcaggaggtcagcagggccctggtggacaaggaccttatggacctagtgcggctgcagcagctgccgccgcaggtgactacaaagatgacgacgataaagattacaaagacgatgacgataaggactataaagatgatgacgacaaataataa

SEQ ID NO: 2749 - protein, 429 aa, synthetic construct
  REGION 1..429: note = Description of Artificial Sequence: Synthetic polypeptide
MRFPSIFTAVLFAASSALAAPVNTTTEDETAQIPAEAVIGYSDLEGDFDVAVLPFSNSTNNGLLFINTTIASIAAKEEGVSLEKREAEAGGYGPGAGQQGPGSGGQQGPGGQGPYGSGQQGPGGAGQQGPGGQGPYGPGAAAAAAAAAGGYGPGAGQQGPGGAGQQGPGSQGPGGQGPYGPGAGQQGPGSQGPGSGGQQGPGGQGPYGPSAAAAAAAAAGGYGPGAGQRSQGPGGQGPYGPGAGQQGPGSQGPGSGGQQGPGGQGPYGPSAAAAAAAAGGYGPGAGQQGPGSQGPGSGGQQGPGGQGPYGPGAAAAAAAVGGYGPGAGQQGPGSQGPGSGGQQGPGGQGPYGPSAAAAAAAAGGYGPGAGQQGPGSQGPGSGGQQGPGGQGPYGPSAAAAAAAAGDYKDDDDKDYKDDDDKDYKDDDDK

SEQ ID NO: 2750 - protein, 744 aa, synthetic construct
  REGION 1..744: note = Description of Artificial Sequence: Synthetic polypeptide
MRFPSIFTAVLFAASSALAAPVNTTTEDETAQIPAEAVIGYSDLEGDFDVAVLPFSNSTNNGLLFINTTIASIAAKEEGVSLEKREAEAGGYGPGAGQQGPGSGGQQGPGGQGPYGSGQQGPGGAGQQGPGGQGPYGPGAAAAAAAAAGGYGPGAGQQGPGGAGQQGPGSQGPGGQGPYGPGAGQQGPGSQGPGSGGQQGPGGQGPYGPSAAAAAAAAAGGYGPGAGQRSQGPGGQGPYGPGAGQQGPGSQGPGSGGQQGPGGQGPYGPSAAAAAAAAGGYGPGAGQQGPGSQGPGSGGQQGPGGQGPYGPGAAAAAAAVGGYGPGAGQQGPGSQGPGSGGQQGPGGQGPYGPSAAAAAAAAGGYGPGAGQQGPGSQGPGSGGQQGPGGQGPYGPSAAAAAAAAGGYGPGAGQQGPGSGGQQGPGGQGPYGSGQQGPGGAGQQGPGGQGPYGPGAAAAAAAAAGGYGPGAGQQGPGGAGQQGPGSQGPGGQGPYGPGAGQQGPGSQGPGSGGQQGPGGQGPYGPSAAAAAAAAAGGYGPGAGQRSQGPGGQGPYGPGAGQQGPGSQGPGSGGQQGPGGQGPYGPSAAAAAAAAGGYGPGAGQQGPGSQGPGSGGQQGPGGQGPYGPGAAAAAAAVGGYGPGAGQQGPGSQGPGSGGQQGPGGQGPYGPSAAAAAAAAGGYGPGAGQQGPGSQGPGSGGQQGPGGQGPYGPSAAAAAAAAGDYKDDDDKDYKDDDDKDYKDDDDK

SEQ ID NO: 2751 - protein, 1059 aa, synthetic construct
  REGION 1..1059: note = Description of Artificial Sequence: Synthetic polypeptide
MRFPSIFTAVLFAASSALAAPVNTTTEDETAQIPAEAVIGYSDLEGDFDVAVLPFSNSTNNGLLFINTTIASIAAKEEGVSLEKREAEAGGYGPGAGQQGPGSGGQQGPGGQGPYGSGQQGPGGAGQQGPGGQGPYGPGAAAAAAAAAGGYGPGAGQQGPGGAGQQGPGSQGPGGQGPYGPGAGQQGPGSQGPGSGGQQGPGGQGPYGPSAAAAAAAAAGGYGPGAGQRSQGPGGQGPYGPGAGQQGPGSQGPGSGGQQGPGGQGPYGPSAAAAAAAAGGYGPGAGQQGPGSQGPGSGGQQGPGGQGPYGPGAAAAAAAVGGYGPGAGQQGPGSQGPGSGGQQGPGGQGPYGPSAAAAAAAAGGYGPGAGQQGPGSQGPGSGGQQGPGGQGPYGPSAAAAAAAAGGYGPGAGQQGPGSGGQQGPGGQGPYGSGQQGPGGAGQQGPGGQGPYGPGAAAAAAAAAGGYGPGAGQQGPGGAGQQGPGSQGPGGQGPYGPGAGQQGPGSQGPGSGGQQGPGGQGPYGPSAAAAAAAAAGGYGPGAGQRSQGPGGQGPYGPGAGQQGPGSQGPGSGGQQGPGGQGPYGPSAAAAAAAAGGYGPGAGQQGPGSQGPGSGGQQGPGGQGPYGPGAAAAAAAVGGYGPGAGQQGPGSQGPGSGGQQGPGGQGPYGPSAAAAAAAAGGYGPGAGQQGPGSQGPGSGGQQGPGGQGPYGPSAAAAAAAAGGYGPGAGQQGPGSGGQQGPGGQGPYGSGQQGPGGAGQQGPGGQGPYGPGAAAAAAAAAGGYGPGAGQQGPGGAGQQGPGSQGPGGQGPYGPGAGQQGPGSQGPGSGGQQGPGGQGPYGPSAAAAAAAAAGGYGPGAGQRSQGPGGQGPYGPGAGQQGPGSQGPGSGGQQGPGGQGPYGPSAAAAAAAAGGYGPGAGQQGPGSQGPGSGGQQGPGGQGPYGPGAAAAAAAVGGYGPGAGQQGPGSQGPGSGGQQGPGGQGPYGPSAAAAAAAAGGYGPGAGQQGPGSQGPGSGGQQGPGGQGPYGPSAAAAAAAAGDYKDDDDKDYKDDDDKDYKDDDDK

SEQ ID NO: 2752 - DNA, 2964 bp, synthetic construct
  misc_feature 1..2964: note = Description of Artificial Sequence: Synthetic polynucleotide
  source 1..2964: mol_type = other DNA
atgagatttccttcaatttttactgctgttttattcgcagcatcctccgcattagctgctccagtcaacactacaacagaagatgaaacggcacaaattccggctgaagctgtcatcggttactcagatttagaaggggatttcgatgttgctgttttgccattttccaacagcacaaataacgggttattgtttataaatactactattgccagcattgctgctaaagaagaaggggtatctctcgagaaaagagaggctgaagcaggtggctatggtcctggagccggtcaacaaggaccaggaggagcgggtcagcaaggccccggatcccaaggtccaggtggagctggacaacaaggacctggaggacaaggtccatatggtccaggagctgccgctgccgctgcagccgtcggtggctatggacctggagctggtcaacaaggtcctggttcccagggtcctggctctggaggtcaacaaggccctggaggtcaaggaccatacggaccgtcggcagcagcagccgcagcagccgctggtggatacggaccaggagcaggccaacaaggtccaggttctcaaggaccaggatcgggcggtcagcagggtccaggtggtttaggcccttacggacctagtgcagctgccgcagctgccgctgctggaggctacggccccggagcgggacaacagggtcctggatctcaaggaccaggttcaggaggtcaacagcgacctggtggattgggtccatacggtccttccgctgctgcagcagcagcagcggccggaggatatggccctggagccggacaacaaggtccaggatctcaaggccctggaagcggaggacaacaaagaccaggaggtttgggaccttatggtccatcagctgccgctgcagctgctgcagcaggtggctatggtcctggagccggtcaacaaggaccaggaggagcgggtcagcaaggccccggatcccaaggtccaggtggagctggacaacaaggacctggaggacaaggtccatatggtccaggagctgccgctgccgctgcagccgtcggtggctatggacctggagctggtcaacaaggtcctggttcccagggtcctggctctggaggtcaacaaggccctggaggtcaaggaccatacggaccgtcggcagcagcagccgcagcagccgctggtggatacggaccaggagcaggccaacaaggtccaggttctcaaggaccaggatcgggcggtcagcagggtccaggtggtttaggcccttacggacctagtgcagctgccgcagctgccgctgctggaggctacggccccggagcgggacaacagggtcctggatctcaaggaccaggttcaggaggtcaacagcgacctggtggattgggtccatacggtccttccgctgctgcagcagcagcagcggccggaggatatggccctggagccggacaacaaggtccaggatctcaaggccctggaagcggaggacaacaaagaccaggaggtttgggaccttatggtccatcagctgccgctgcagctgctgcagcaggtggctatggtcctggagccggtcaacaaggaccaggaggagcgggtcagcaaggccccggatcccaaggtccaggtggagctggacaacaaggacctggaggacaaggtccatatggtccaggagctgccgctgccgctgcagccgtcggtggctatggacctggagctggtcaacaaggtcctggttcccagggtcctggctctggaggtcaacaaggccctggaggtcaaggaccatacggaccgtcggcagcagcagccgcagcagccgctggtggatacggaccaggagcaggccaacaaggtccaggttctcaaggaccaggatcgggcggtcagcagggtccaggtggtttaggcccttacggacctagtgcagctgccgcagctgccgctgctggaggctacggccccggagcgggacaacagggtcctggatctcaaggaccaggttcaggaggtcaacagcgacctggtggattgggtccatacggtccttccgctgctgcagcagcagcagcggccggaggatatggccctggagccggacaacaaggtccaggatctcaaggccctggaagcggaggacaacaaagaccaggaggtttgggaccttatggtccatcagctgccgctgcagctgctgcagcaggtggctatggtcctggagccggtcaacaaggaccaggaggagcgggtcagcaaggccccggatcccaaggtccaggtggagctggacaacaaggacctggaggacaaggtccatatggtccaggagctgccgctgccgctgcagccgtcggtggctatggacctggagctggtcaacaaggtcctggttcccagggtcctggctctggaggtcaacaaggccctggaggtcaaggaccatacggaccgtcggcagcagcagccgcagcagccgctggtggatacggaccaggagcaggccaacaaggtccaggttctcaaggaccaggatcgggcggtcagcagggtccaggtggtttaggcccttacggacctagtgcagctgccgcagctgccgctgctggaggctacggccccggagcgggacaacagggtcctggatctcaaggaccaggttcaggaggtcaacagcgacctggtggattgggtccatacggtccttccgctgctgcagcagcagcagcggccggaggatatggccctggagccggacaacaaggtccaggatctcaaggccctggaagcggaggacaacaaagaccaggaggtttgggaccttatggtccatcagctgccgctgcagctgctgcagcaggtgactacaaagatgacgacgataaagattacaaagacgatgacgataaggactataaagatgatgacgacaaataataa

SEQ ID NO: 2753 - DNA, 3684 bp, synthetic construct
  misc_feature 1..3684: note = Description of Artificial Sequence: Synthetic polynucleotide
  source 1..3684: mol_type = other DNA
atgagatttccttcaatttttactgctgttttattcgcagcatcctccgcattagctgctccagtcaacactacaacagaagatgaaacggcacaaattccggctgaagctgtcatcggttactcagatttagaaggggatttcgatgttgctgttttgccattttccaacagcacaaataacgggttattgtttataaatactactattgccagcattgctgctaaagaagaaggggtatctctcgagaaaagagaggctgaagcaggtagtgcgccacaaggtgcaggtggtccagcgccacaaggtccttcccagcaaggaccagttagccagggtccatatggaccaggtgctgcagccgctgctgctgctgcaggtggttacggaccaggtgccggacaacaaggcccaggtagccagggaccaggtagtggaggacaacagggtccgggatcacagggaccaggatcaggtggccaacagggtcctggtggacaaggcccatatggtccatcggccgccgccgccgccgcagctgcagctggaggatacggaccaggagccggtcaacagggacctggttcccaaggtccaggttccggtggccaacagggacctggcggacaaggtccttacggtcctggcgcagctgctgctgccgcagctgttggtggttacggacctggtgctggacaacaaggccctggatctcaaggtccaggatccggaggtcaacaaggacctggaggacaaggaccttatggtcctagtgcggcagcagcagctgctgcagccggaggttatggaccaggtgctggtcaacaaggtccaggttcacaaggtcccggttctggtggacaacagggtccaggtggacagggtccatacggaccttcagctgccgcagctgccgctgccgcaggaggttacggtcccggagctggtcagcaaggtcctggatctggaggacagcaaggtccaggtggacaaggaccatacggctccggccagcagggaccaggtggtgcaggacaacagggcccaggcggacaaggaccttacggaccaggtgcagctgcagctgctgctgcagcagcaggtagtgcgccacaaggtgcaggtggtccagcgccacaaggtccttcccagcaaggaccagttagccagggtccatatggaccaggtgctgcagccgctgctgctgctgcaggtggttacggaccaggtgccggacaacaaggcccaggtagccagggaccaggtagtggaggacaacagggtccgggatcacagggaccaggatcaggtggccaacagggtcctggtggacaaggcccatatggtccatcggccgccgccgccgccgcagctgcagctggaggatacggaccaggagccggtcaacagggacctggttcccaaggtccaggttccggtggccaacagggacctggcggacaaggtccttacggtcctggcgcagctgctgctgccgcagctgttggtggttacggacctggtgctggacaacaaggccctggatctcaaggtccaggatccggaggtcaacaaggacctggaggacaaggaccttatggtcctagtgcggcagcagcagctgctgcagccggaggttatggaccaggtgctggtcaacaaggtccaggttcacaaggtcccggttctggtggacaacagggtccaggtggacagggtccatacggaccttcagctgccgcagctgccgctgccgcaggaggttacggtcccggagctggtcagcaaggtcctggatctggaggacagcaaggtccaggtggacaaggaccatacggctccggccagcagggaccaggtggtgcaggacaacagggcccaggcggacaaggaccttacggaccaggtgcagctgcagctgctgctgcagcagcaggtagtgcgccacaaggtgcaggtggtccagcgccacaaggtccttcccagcaaggaccagttagccagggtccatatggaccaggtgctgcagccgctgctgctgctgcaggtggttacggaccaggtgccggacaacaaggcccaggtagccagggaccaggtagtggaggacaacagggtccgggatcacagggaccaggatcaggtggccaacagggtcctggtggacaaggcccatatggtccatcggccgccgccgccgccgcagctgcagctggaggatacggaccaggagccggtcaacagggacctggttcccaaggtccaggttccggtggccaacagggacctggcggacaaggtccttacggtcctggcgcagctgctgctgccgcagctgttggtggttacggacctggtgctggacaacaaggccctggatctcaaggtccaggatccggaggtcaacaaggacctggaggacaaggaccttatggtcctagtgcggcagcagcagctgctgcagccggaggttatggaccaggtgctggtcaacaaggtccaggttcacaaggtcccggttctggtggacaacagggtccaggtggacagggtccatacggaccttcagctgccgcagctgccgctgccgcaggaggttacggtcccggagctggtcagcaaggtcctggatctggaggacagcaaggtccaggtggacaaggaccatacggctccggccagcagggaccaggtggtgcaggacaacagggcccaggcggacaaggaccttacggaccaggtgcagctgcagctgctgctgcagcagcaggtagtgcgccacaaggtgcaggtggtccagcgccacaaggtccttcccagcaaggaccagttagccagggtccatatggaccaggtgctgcagccgctgctgctgctgcaggtggttacggaccaggtgccggacaacaaggcccaggtagccagggaccaggtagtggaggacaacagggtccgggatcacagggaccaggatcaggtggccaacagggtcctggtggacaaggcccatatggtccatcggccgccgccgccgccgcagctgcagctggaggatacggaccaggagccggtcaacagggacctggttcccaaggtccaggttccggtggccaacagggacctggcggacaaggtccttacggtcctggcgcagctgctgctgccgcagctgttggtggttacggacctggtgctggacaacaaggccctggatctcaaggtccaggatccggaggtcaacaaggacctggaggacaaggaccttatggtcctagtgcggcagcagcagctgctgcagccggaggttatggaccaggtgctggtcaacaaggtccaggttcacaaggtcccggttctggtggacaacagggtccaggtggacagggtccatacggaccttcagctgccgcagctgccgctgccgcaggaggttacggtcccggagctggtcagcaaggtcctggatctggaggacagcaaggtccaggtggacaaggaccatacggctccggccagcagggaccaggtggtgcaggacaacagggcccaggcggacaaggaccttacggaccaggtgcagctgcagctgctgctgcagcagcaggtgactacaaagatgacgacgataaagattacaaagacgatgacgataaggactataaagatgatgacgacaaataataa

SEQ ID NO: 2754 - DNA, 3360 bp, synthetic construct; identical to SEQ ID NO: 1464
  misc_feature 1..3360: note = Description of Artificial Sequence: Synthetic polynucleotide
  source 1..3360: mol_type = other DNA

SEQ ID NO: 2755 - DNA, 3084 bp, synthetic construct
  misc_feature 1..3084: note = Description of Artificial Sequence: Synthetic polynucleotide
  source 1..3084: mol_type = other DNA
atgagatttccttcaatttttactgctgttttattcgcagcatcctccgcattagctgctccagtcaacactacaacagaagatgaaacggcacaaattccggctgaagctgtcatcggttactcagatttagaaggggatttcgatgttgctgttttgccattttccaacagcacaaataacgggttattgtttataaatactactattgccagcattgctgctaaagaagaaggggtatctctcgagaaaagagaggctgaagcaggtggatatggacctggcgctggtcagcaaggtcctggatctggaggacagcagggacctggtggacaaggtccatatggcagcggtcaacaaggaccaggtggagcaggtcaacaaggacctggaggtcagggaccttatggccctggtgcagccgcagccgcggccgccgctgctggtggttacggaccaggcgcaggtcaacaaggtcctggcggtgctggacaacagggcccaggttcccagggcccgggtggtcaaggtccatatggtcctggagcaggacaacagggtcctggttctcagggtccaggtagtggcggtcaacaaggtccaggaggccaaggtccttacggcccatcagccgcagcggctgccgctgctgctgccggtggttacggacccggtgctggtcaacgaagtcaaggtccaggaggtcagggtccatacggtccaggtgcaggtcagcagggaccaggatctcaaggtccaggttcaggaggccaacaaggcccaggaggtcagggaccatatggtccatctgctgctgctgctgccgctgccgcaggacctggtgctggtagacaaggtcctggtagccaaggtcctggatccggaggtcagcaaggcccgggcggtcagggtccatatggaccatcggctgctgccgcagctgctgctgcaggtggatatggacctggcgctggtcagcaaggtcctggatctggaggacagcagggacctggtggacaaggtccatatggcagcggtcaacaaggaccaggtggagcaggtcaacaaggacctggaggtcagggaccttatggccctggtgcagccgcagccgcggccgccgctgctggtggttacggaccaggcgcaggtcaacaaggtcctggcggtgctggacaacagggcccaggttcccagggcccgggtggtcaaggtccatatggtcctggagcaggacaacagggtcctggttctcagggtccaggtagtggcggtcaacaaggtccaggaggccaaggtccttacggcccatcagccgcagcggctgccgctgctgctgccggtggttacggacccggtgctggtcaacgaagtcaaggtccaggaggtcagggtccatacggtccaggtgcaggtcagcagggaccaggatctcaaggtccaggttcaggaggccaacaaggcccaggaggtcagggaccatatggtccatctgctgctgctgctgccgctgccgcaggacctggtgctggtagacaaggtcctggtagccaaggtcctggatccggaggtcagcaaggcccgggcggtcagggtccatatggaccatcggctgctgccgcagctgctgctgcaggtggatatggacctggcgctggtcagcaaggtcctggatctggaggacagcagggacctggtggacaaggtccatatggcagcggtcaacaaggaccaggtggagcaggtcaacaaggacctggaggtcagggaccttatggccctggtgcagccgcagccgcggccgccgctgctggtggttacggaccaggcgcaggtcaacaaggtcctggcggtgctggacaacagggcccaggttcccagggcccgggtggtcaaggtccatatggtcctggagcaggacaacagggtcctggttctcagggtccaggtagtggcggtcaacaaggtccaggaggccaaggtccttacggcccatcagccgcagcggctgccgctgctgctgccggtggttacggacccggtgctggtcaacgaagtcaaggtccaggaggtcagggtccatacggtccaggtgcaggtcagcagggaccaggatctcaaggtccaggttcaggaggccaacaaggcccaggaggtcagggaccatatggtccatctgctgctgctgctgccgctgccgcaggacctggtgctggtagacaaggtcctggtagccaaggtcctggatccggaggtcagcaaggcccgggcggtcagggtccatatggaccatcggctgctgccgcagctgctgctgcaggtggatatggacctggcgctggtcagcaaggtcctggatctggaggacagcagggacctggtggacaaggtccatatggcagcggtcaacaaggaccaggtggagcaggtcaacaaggacctggaggtcagggaccttatggccctggtgcagccgcagccgcggccgccgctgctggtggttacggaccaggcgcaggtcaacaaggtcctggcggtgctggacaacagggcccaggttcccagggcccgggtggtcaaggtccatatggtcctggagcaggacaacagggtcctggttctcagggtccaggtagtggcggtcaacaaggtccaggaggccaaggtccttacggcccatcagccgcagcggctgccgctgctgctgccggtggttacggacccggtgctggtcaacgaagtcaaggtccaggaggtcagggtccatacggtccaggtgcaggtcagcagggaccaggatctcaaggtccaggttcaggaggccaacaaggcccaggaggtcagggaccatatggtccatctgctgctgctgctgccgctgccgcaggacctggtgctggtagacaaggtcctggtagccaaggtcctggatccggaggtcagcaaggcccgggcggtcagggtccatatggaccatcggctgctgccgcagctgctgctgcaggtgactacaaagatgacgacgataaagattacaaagacgatgacgataaggactataaagatgatgacgacaaataataa

SEQ ID NO: 2756 - DNA, 3432 bp, synthetic construct
  misc_feature 1..3432: note = Description of Artificial Sequence: Synthetic polynucleotide
  source 1..3432: mol_type = other DNA
atgagatttccttcaatttttactgctgttttattcgcagcatcctccgcattagctgctccagtcaacactacaacagaagatgaaacggcacaaattccggctgaagctgtcatcggttactcagatttagaaggggatttcgatgttgctgttttgccattttccaacagcacaaataacgggttattgtttataaatactactattgccagcattgctgctaaagaagaaggggtatctctcgagaaaagagaggctgaagcaggtcctggagcaagaaggcaaggtccaggtagtcagggcccaggttcgggtggtcaacaaggaccaggtggtcagggtccatatggtagtggccagcaaggtccaggtggcgccggtcaacaaggtccaggcggacaaggaccttacggtccaggcgctgccgccgcagcggctgcagccgcaggtggctatggtcctggtgctggccaacaaggaccaggaggagctggccaacagggaccaggaagtcaaggacctggaggacagggaccatatggtccaggagcaggacaacaaggtccgggctcccagggtccgggatctggaggacaacagggccctggaggacaaggtccatatggaccttcggccgccgcagctgcagctgccgcaggaggatatggccctggtgctggacaacagggacctggatcccaaggacctggtagtggaggtcaacaaggcccaggaggacaaggtccttacggtcccggtgcagctgccgctgctgccgctgtaggcggttacggaccaggagcaggtcaacaaggtcctggttctcaaggacctggttcaggaggacaacagggtccaggcggtcaaggcccttatggaccatccgctgctgctgctgcagctgcggcaggtggctacggtcctggtgccggacaacaaggtccaggatctcagggacctggttccggaggacaacaaggaccgggaggacaaggtccgtatggtccttctgctgccgcagccgcggctgctgcaggtcctggagcaagaaggcaaggtccaggtagtcagggcccaggttcgggtggtcaacaaggaccaggtggtcagggtccatatggtagtggccagcaaggtccaggtggcgccggtcaacaaggtccaggcggacaaggaccttacggtccaggcgctgccgccgcagcggctgcagccgcaggtggctatggtcctggtgctggccaacaaggaccaggaggagctggccaacagggaccaggaagtcaaggacctggaggacagggaccatatggtccaggagcaggacaacaaggtccgggctcccagggtccgggatctggaggacaacagggccctggaggacaaggtccatatggaccttcggccgccgcagctgcagctgccgcaggaggatatggccctggtgctggacaacagggacctggatcccaaggacctggtagtggaggtcaacaaggcccaggaggacaaggtccttacggtcccggtgcagctgccgctgctgccgctgtaggcggttacggaccaggagcaggtcaacaaggtcctggttctcaaggacctggttcaggaggacaacagggtccaggcggtcaaggcccttatggaccatccgctgctgctgctgcagctgcggcaggtggctacggtcctggtgccggacaacaaggtccaggatctcagggacctggttccggaggacaacaaggaccgggaggacaaggtccgtatggtccttctgctgccgcagccgcggctgctgcaggtcctggagcaagaaggcaaggtccaggtagtcagggcccaggttcgggtggtcaacaaggaccaggtggtcagggtccatatggtagtggccagcaaggtccaggtggcgccggtcaacaaggtccaggcggacaaggaccttacggtccaggcgctgccgccgcagcggctgcagccgcaggtggctatggtcctggtgctggccaacaaggaccaggaggagctggccaacagggaccaggaagtcaaggacctggaggacagggaccatatggtccaggagcaggacaacaaggtccgggctcccagggtccgggatctggaggacaacagggccctggaggacaaggtccatatggaccttcggccgccgcagctgcagctgccgcaggaggatatggccctggtgctggacaacagggacctggatcccaaggacctggtagtggaggtcaacaaggcccaggaggacaaggtccttacggtcccggtgcagctgccgctgctgccgctgtaggcggttacggaccaggagcaggtcaacaaggtcctggttctcaaggacctggttcaggaggacaacagggtccaggcggtcaaggcccttatggaccatccgctgctgctgctgcagctgcggcaggtggctacggtcctggtgccggacaacaaggtccaggatctcagggacctggttccggaggacaacaaggaccgggaggacaaggtccgtatggtccttctgctgccgcagccgcggctgctgcaggtcctggagcaagaaggcaaggtccaggtagtcagggcccaggttcgggtggtcaacaaggaccaggtggtcagggtccatatggtagtggccagcaaggtccaggtggcgccggtcaacaaggtccaggcggacaaggaccttacggtccaggcgctgccgccgcagcggctgcagccgcaggtggctatggtcctggtgctggccaacaaggaccaggaggagctggccaacagggaccaggaagtcaaggacctggaggacagggaccatatggtccaggagcaggacaacaaggtccgggctcccagggtccgggatctggaggacaacagggccctggaggacaaggtccatatggaccttcggccgccgcagctgcagctgccgcaggaggatatggccctggtgctggacaacagggacctggatcccaaggacctggtagtggaggtcaacaaggcccaggaggacaaggtccttacggtcccggtgcagctgccgctgctgccgctgtaggcggttacggaccaggagcaggtcaacaaggtcctggttctcaaggacctggttcaggaggacaacagggtccaggcggtcaaggcccttatggaccatccgctgctgctgctgcagctgcggcaggtggctacggtcctggtgccggacaacaaggtccaggatctcagggacctggttccggaggacaacaaggaccgggaggacaaggtccgtatggtccttctgctgccgcagccgcggctgctgcaggtgactacaaagatgacgacgataaagattacaaagacgatgacgataaggactataaagatgatgacgacaaataataa

SEQ ID NO: 2757 - DNA, 3408 bp, synthetic construct
  misc_feature 1..3408: note = Description of Artificial Sequence: Synthetic polynucleotide
  source 1..3408: mol_type = other DNA
atgagatttccttcaatttttactgctgttttattcgcagcatcctccgcattagctgctccagtcaacactacaacagaagatgaaacggcacaaattccggctgaagctgtcatcggttactcagatttagaaggggatttcgatgttgctgttttgccattttccaacagcacaaataacgggttattgtttataaatactactattgccagcattgctgctaaagaagaaggggtatctctcgagaaaagagaggctgaagcaggtggatacggaccaggtgcaggacaacaaggccctggttccggtggacaacaaggaccaggtggacagggcccttacggctcaggtcagcaaggtccaggaggagcaggtcaacagggtcctggtggtcaaggaccttatggaccaggagctgctgccgcggcagcagcagctgccggaggttacggtccaggtgccggacaacagggtcctggaggtgctggacagcagggtccagagggaccaggttcccaaggtcctggatctggtggtcaacaaggaccaggaggtcagggcccttacggtccaggagctgcagccgctgctgctgcggtcggaggttacggacctggagctggacaacaaggacctggttcacagggacctggaagtggtggtcaacaaggtcctggaggccaaggcccatacggtccatcagctgccgctgccgcagctgctgccggtggttatggtcctggtgctggtcaacaaggtccaggatcgcaaggcccgggatcgggtggacaacagggtccgggaggtcagggaccatatggcccaagtgccgctgcagcagccgccgcagctggtggatatggaccaggagcaggtcaacaaggacctggatccggtggacaacagggaccaggtggacaaggaccatatggatctggtcaacagggaccaggaggtgctggccagcaaggccctggtggtcaaggaccatatggtccaggagcggccgctgctgcggccgctgctgcaggtggatacggaccaggtgcaggacaacaaggccctggttccggtggacaacaaggaccaggtggacagggcccttacggctcaggtcagcaaggtccaggaggagcaggtcaacagggtcctggtggtcaaggaccttatggaccaggagctgctgccgcggcagcagcagctgccggaggttacggtccaggtgccggacaacagggtcctggaggtgctggacagcagggtccagagggaccaggttcccaaggtcctggatctggtggtcaacaaggaccaggaggtcagggcccttacggtccaggagctgcagccgctgctgctgcggtcggaggttacggacctggagctggacaacaaggacctggttcacagggacctggaagtggtggtcaacaaggtcctggaggccaaggcccatacggtccatcagctgccgctgccgcagctgctgccggtggttatggtcctggtgctggtcaacaaggtccaggatcgcaaggcccgggatcgggtggacaacagggtccgggaggtcagggaccatatggcccaagtgccgctgcagcagccgccgcagctggtggatatggaccaggagcaggtcaacaaggacctggatccggtggacaacagggaccaggtggacaaggaccatatggatctggtcaacagggaccaggaggtgctggccagcaaggccctggtggtcaaggaccatatggtccaggagcggccgctgctgcggccgctgctgcaggtggatacggaccaggtgcaggacaacaaggccctggttccggtggacaacaaggaccaggtggacagggcccttacggctcaggtcagcaaggtccaggaggagcaggtcaacagggtcctggtggtcaaggaccttatggaccaggagctgctgccgcggcagcagcagctgccggaggttacggtccaggtgccggacaacagggtcctggaggtgctggacagcagggtccagagggaccaggttcccaaggtcctggatctggtggtcaacaaggaccaggaggtcagggcccttacggtccaggagctgcagccgctgctgctgcggtcggaggttacggacctggagctggacaacaaggacctggttcacagggacctggaagtggtggtcaacaaggtcctggaggccaaggcccatacggtccatcagctgccgctgccgcagctgctgccggtggttatggtcctggtgctggtcaacaaggtccaggatcgcaaggcccgggatcgggtggacaacagggtccgggaggtcagggaccatatggcccaagtgccgctgcagcagccgccgcagctggtggatatggaccaggagcaggtcaacaaggacctggatccggtggacaacagggaccaggtggacaaggaccatatggatctggtcaacagggaccaggaggtgctggccagcaaggccctggtggtcaaggaccatatggtccaggagcggccgctgctgcggccgctgctgcaggtggatacggaccaggtgcaggacaacaaggccctggttccggtggacaacaaggaccaggtggacagggcccttacggctcaggtcagcaaggtccaggaggagcaggtcaacagggtcctggtggtcaaggaccttatggaccaggagctgctgccgcggcagcagcagctgccggaggttacggtccaggtgccggacaacagggtcctggaggtgctggacagcagggtccagagggaccaggttcccaaggtcctggatctggtggtcaacaaggaccaggaggtcagggcccttacggtccaggagctgcagccgctgctgctgcggtcggaggttacggacctggagctggacaacaaggacctggttcacagggacctggaagtggtggtcaacaaggtcctggaggccaaggcccatacggtccatcagctgccgctgccgcagctgctgccggtggttatggtcctggtgctggtcaacaaggtccaggatcgcaaggcccgggatcgggtggacaacagggtccgggaggtcagggaccatatggcccaagtgccgctgcagcagccgccgcagctggtggatatggaccaggagcaggtcaacaaggacctggatccggtggacaacagggaccaggtggacaaggaccatatggatctggtcaacagggaccaggaggtgctggccagcaaggccctggtggtcaaggaccatatggtccaggagcggccgctgctgcggccgctgctgcaggtgactacaaagatgacgacgataaagattacaaagacgatgacgataaggactataaagatgatgacgacaaataataa

SEQ ID NO: 2758 - DNA, 3372 bp, synthetic construct
  misc_feature 1..3372: note = Description of Artificial Sequence: Synthetic polynucleotide
  source 1..3372: mol_type = other DNA
atgagatttccttcaatttttactgctgttttattcgcagcatcctccgcattagctgctccagtcaacactacaacagaagatgaaacggcacaaattccggctgaagctgtcatcggttactcagatttagaaggggatttcgatgttgctgttttgccattttccaacagcacaaataacgggttattgtttataaatactactattgccagcattgctgctaaagaagaaggggtatctctcgagaaaagagaggctgaagcaggtggatacggtccgggtgcgggtcaacagggaccaggtggagctggtcaacagggacctggatcacaaggacctggaggtcaaggcccttatggtcccggtgcaggacaacaaggacctggatcgcaaggtcctggatctggaggacagcaaggtcctggtggccaaggcccatacggtccatcagccgcagctgccgcagctgctgccggaggttatggaccaggtgctggtcaacaaggcccgggttcacaaggacctggtagtggtggtcagcaaggaccaggtagtcagggaccaggatcaggtggacaacaaggtccgggtggtcaaggtccatatggaccgtccgctgcggctgcagcagctgctgccgcaggaggttacggacctggcgctggtcaacagggtccaggttcccaaggacctggttctggaggtcaacaaggtccaggtggacagggcccatacggaccaggagcagccgccgccgcagctgctgtgggtggttatggtccaggtgccggacagcaaggaccaggatcccaaggaccaggttctggcggccaacagggtccaggaggccagggcccttatggaccaagtgctgccgcagccgccgcagcagcgggtggttacggtccaggtgccggtcaacaaggaccaggatctcaaggtccaggttccggcggtcaacaaggcccaggaggtcagggtccttatggaccatcggcagctgctgctgctgcagcggcaggtggatacggtccgggtgcgggtcaacagggaccaggtggagctggtcaacagggacctggatcacaaggacctggaggtcaaggcccttatggtcccggtgcaggacaacaaggacctggatcgcaaggtcctggatctggaggacagcaaggtcctggtggccaaggcccatacggtccatcagccgcagctgccgcagctgctgccggaggttatggaccaggtgctggtcaacaaggcccgggttcacaaggacctggtagtggtggtcagcaaggaccaggtagtcagggaccaggatcaggtggacaacaaggtccgggtggtcaaggtccatatggaccgtccgctgcggctgcagcagctgctgccgcaggaggttacggacctggcgctggtcaacagggtccaggttcccaaggacctggttctggaggtcaacaaggtccaggtggacagggcccatacggaccaggagcagccgccgccgcagctgctgtgggtggttatggtccaggtgccggacagcaaggaccaggatcccaaggaccaggttctggcggccaacagggtccaggaggccagggcccttatggaccaagtgctgccgcagccgccgcagcagcgggtggttacggtccaggtgccggtcaacaaggaccaggatctcaaggtccaggttccggcggtcaacaaggcccaggaggtcagggtccttatggaccatcggcagctgctgctgctgcagcggcaggtggatacggtccgggtgcgggtcaacagggaccaggtggagctggtcaacagggacctggatcacaaggacctggaggtcaaggcccttatggtcccggtgcaggacaacaaggacctggatcgcaaggtcctggatctggaggacagcaaggtcctggtggccaaggcccatacggtccatcagccgcagctgccgcagctgctgccggaggttatggaccaggtgctggtcaacaaggcccgggttcacaaggacctggtagtggtggtcagcaaggaccaggtagtcagggaccaggatcaggtggacaacaaggtccgggtggtcaaggtccatatggaccgtccgctgcggctgcagcagctgctgccgcaggaggttacggacctggcgctggtcaacagggtccaggttcccaaggacctggttctggaggtcaacaaggtccaggtggacagggcccatacggaccaggagcagccgccgccgcagctgctgtgggtggttatggtccaggtgccggacagcaaggaccaggatcccaaggaccaggttctggcggccaacagggtccaggaggccagggcccttatggaccaagtgctgccgcagccgccgcagcagcgggtggttacggtccaggtgccggtcaacaaggaccaggatctcaaggtccaggttccggcggtcaacaaggcccaggaggtcagggtccttatggaccatcggcagctgctgctgctgcagcggcaggtggatacggtccgggtgcgggtcaacagggaccaggtggagctggtcaacagggacctggatcacaaggacctggaggtcaaggcccttatggtcccggtgcaggacaacaaggacctggatcgcaaggtcctggatctggaggacagcaaggtcctggtggccaaggcccatacggtccatcagccgcagctgccgcagctgctgccggaggttatggaccaggtgctggtcaacaaggcccgggttcacaaggacctggtagtggtggtcagcaaggaccaggtagtcagggaccaggatcaggtggacaacaaggtccgggtggtcaaggtccatatggaccgtccgctgcggctgcagcagctgctgccgcaggaggttacggacctggcgctggtcaacagggtccaggttcccaaggacctggttctggaggtcaacaaggtccaggtggacagggcccatacggaccaggagcagccgccgccgcagctgctgtgggtggttatggtccaggtgccggacagcaaggaccaggatcccaaggaccaggttctggcggccaacagggtccaggaggccagggcccttatggaccaagtgctgccgcagccgccgcagcagcgggtggttacggtccaggtgccggtcaacaaggaccaggatctcaaggtccaggttccggcggtcaacaaggcccaggaggtcagggtccttatggaccatcggcagctgctgctgctgcagcggcaggtgactacaaagatgacgacgataaagattacaaagacgatgacgataaggactataaagatgatgacgacaaataataa

SEQ ID NO: 2759 - DNA, 3480 bp, synthetic construct
  misc_feature 1..3480: note = Description of Artificial Sequence: Synthetic polynucleotide
  source 1..3480: mol_type = other DNA
atgagatttccttcaatttttactgctgttttattcgcagcatcctccgcattagctgctccagtcaacactacaacagaagatgaaacggcacaaattccggctgaagctgtcatcggttactcagatttagaaggggatttcgatgttgctgttttgccattttccaacagcacaaataacgggttattgtttataaatactactattgccagcattgctgctaaagaagaaggggtatctctcgagaaaagagaggctgaagcaggtggttacggtccgggcgctggacaacaaggaccaggttctggtggacaacaaggtcccggtggacaaggtccttacggttcaggccagcaaggtccgggaggagctggtcaacaaggaccaggcggtcaaggtccatacggaccgggagcagcagctgcagcagcagccgctgctggtggatatggtcccggagctggtcaacagggacctggaggagccggacaacaaggacctggtagtcaaggtcctggtggacaaggtccatacggcccaggagcaggtcagcaaggtccgggttctcaaggtcctggctcaggtggacaacaaggcccaggtggacaaggaccatatggtccttctgctgctgccgctgctgcagcagcaggaggatatggaccaggtgctggtcaacagggtccaggttctcagggcccgggttccggaggacagcaaggaccaggcggacaaggcccttacggaccgtcggccgccgctgcggctgctgcagcaggaggatacggtcctggcgcgggtcaacaaggtcctggatctggcggtcagcaaggtccaggaggtcaaggaccatacggttctggtcaacaaggcccaggaggagctggacagcagggccctggaggtcaaggtccttacggtggcggttatggtccaggtgctggacaacagggtcctggatcgcagggaccaggaagtggcggtcaacaaggtccaggtggtcaaggtccttatggtcctagcgccgctgcagctgcagctgcagcaggtggttacggtccgggcgctggacaacaaggaccaggttctggtggacaacaaggtcccggtggacaaggtccttacggttcaggccagcaaggtccgggaggagctggtcaacaaggaccaggcggtcaaggtccatacggaccgggagcagcagctgcagcagcagccgctgctggtggatatggtcccggagctggtcaacagggacctggaggagccggacaacaaggacctggtagtcaaggtcctggtggacaaggtccatacggcccaggagcaggtcagcaaggtccgggttctcaaggtcctggctcaggtggacaacaaggcccaggtggacaaggaccatatggtccttctgctgctgccgctgctgcagcagcaggaggatatggaccaggtgctggtcaacagggtccaggttctcagggcccgggttccggaggacagcaaggaccaggcggacaaggcccttacggaccgtcggccgccgctgcggctgctgcagcaggaggatacggtcctggcgcgggtcaacaaggtcctggatctggcggtcagcaaggtccaggaggtcaaggaccatacggttctggtcaacaaggcccaggaggagctggacagcagggccctggaggtcaaggtccttacggtggcggttatggtccaggtgctggacaacagggtcctggatcgcagggaccaggaagtggcggtcaacaaggtccaggtggtcaaggtccttatggtcctagcgccgctgcagctgcagctgcagcaggtggttacggtccgggcgctggacaacaaggaccaggttctggtggacaacaaggtcccggtggacaaggtccttacggttcaggccagcaaggtccgggaggagctggtcaacaaggaccaggcggtcaaggtccatacggaccgggagcagcagctgcagcagcagccgctgctggtggatatggtcccggagctggtcaacagggacctggaggagccggacaacaaggacctggtagtcaaggtcctggtggacaaggtccatacggcccaggagcaggtcagcaaggtccgggttctcaaggtcctggctcaggtggacaacaaggcccaggtggacaaggaccatatggtccttctgctgctgccgctgctgcagcagcaggaggatatggaccaggtgctggtcaacagggtccaggttctcagggcccgggttccggaggacagcaaggaccaggcggacaaggcccttacggaccgtcggccgccgctgcggctgctgcagcaggaggatacggtcctggcgcgggtcaacaaggtcctggatctggcggtcagcaaggtccaggaggtcaaggaccatacggttctggtcaacaaggcccaggaggagctggacagcagggccctggaggtcaaggtccttacggtggcggttatggtccaggtgctggacaacagggtcctggatcgcagggaccaggaagtggcggtcaacaaggtccaggtggtcaaggtccttatggtcctagcgccgctgcagctgcagctgcagcaggtggttacggtccgggcgctggacaacaaggaccaggttctggtggacaacaaggtcccggtggacaaggtccttacggttcaggccagcaaggtccgggaggagctggtcaacaaggaccaggcggtcaaggtccatacggaccgggagcagcagctgcagcagcagccgctgctggtggatatggtcccggagctggtcaacagggacctggaggagccggacaacaaggacctggtagtcaaggtcctggtggacaaggtccatacggcccaggagcaggtcagcaaggtccgggttctcaaggtcctggctcaggtggacaacaaggcccaggtggacaaggaccatatggtccttctgctgctgccgctgctgcagcagcaggaggatatggaccaggtgctggtcaacagggtccaggttctcagggcccgggttccggaggacagcaaggaccaggcggacaaggcccttacggaccgtcggccgccgctgcggctgctgcagcaggaggatacggtcctggcgcgggtcaacaaggtcctggatctggcggtcagcaaggtccaggaggtcaaggaccatacggttctggtcaacaaggcccaggaggagctggacagcagggccctggaggtcaaggtccttacggtggcggttatggtccaggtgctggacaacagggtcctggatcgcagggaccaggaagtggcggtcaacaaggtccaggtggtcaaggtccttatggtcctagcgccgctgcagctgcagctgcagcaggtgactacaaagatgacgacgataaagattacaaagacgatgacgataaggactataaagatgatgacgacaaataataa

SEQ ID NO: 2760 - DNA, 3444 bp, synthetic construct
  misc_feature 1..3444: note = Description of Artificial Sequence: Synthetic polynucleotide
  source 1..3444: mol_type = other DNA
atgagatttccttcaatttttactgctgttttattcgcagcatcctccgcattagctgctccagtcaacactacaacagaagatgaaacggcacaaattccggctgaagctgtcatcggttactcagatttagaaggggatttcgatgttgctgttttgccattttccaacagcacaaataacgggttattgtttataaatactactattgccagcattgctgctaaagaagaaggggtatctctcgagaaaagagaggctgaagcaggtccaggagcccgtagacaaggtccgggctcacaaggtccaggatctggtggacaacaaggaccaggtggccaaggcccatacggatctggacaacagggtcctggtggagctggtcaacagggtccgggcggtcagggcccctacggtccaggagcagcagctgctgcggctgctgcagcaggaggatatggacctggagccggtcaacagggacctggaggtgctggccagcagggtcctggttctcagggaccaggtggtcagggtccatacggcccaggcgccggtcagcaaggaccaggttcacaaggcccaggctctggaggtcagcaaggacccggaggtcaaggtccttatggtccaagtgccgctgctgctgctgctgcagctgcaggaggatacggtccgggagctggtcagcaaggacctggttcgcaaggtcctggtagtggtggccaacaaggtccaggtggtcaaggaccgtacggtccaggagctgcagctgccgccgctgctgtaggaggatacggtccaggtgctggtcaacaaggtcctggaagtcaaggtccaggatccggaggtcagcagggacctggtggacaaggaccttatggtccttctgcagcagctgcagcggctgccgctggtggatatggtcctggagctggacagcagggcccaggatctcagggcccgggttctggaggacaacaaggacctggtggacagggtccatacggaccttccgctgccgccgcggcagctgcagcaggtccaggagcccgtagacaaggtccgggctcacaaggtccaggatctggtggacaacaaggaccaggtggccaaggcccatacggatctggacaacagggtcctggtggagctggtcaacagggtccgggcggtcagggcccctacggtccaggagcagcagctgctgcggctgctgcagcaggaggatatggacctggagccggtcaacagggacctggaggtgctggccagcagggtcctggttctcagggaccaggtggtcagggtccatacggcccaggcgccggtcagcaaggaccaggttcacaaggcccaggctctggaggtcagcaaggacccggaggtcaaggtccttatggtccaagtgccgctgctgctgctgctgcagctgcaggaggatacggtccgggagctggtcagcaaggacctggttcgcaaggtcctggtagtggtggccaacaaggtccaggtggtcaaggaccgtacggtccaggagctgcagctgccgccgctgctgtaggaggatacggtccaggtgctggtcaacaaggtcctggaagtcaaggtccaggatccggaggtcagcagggacctggtggacaaggaccttatggtccttctgcagcagctgcagcggctgccgctggtggatatggtcctggagctggacagcagggcccaggatctcagggcccgggttctggaggacaacaaggacctggtggacagggtccatacggaccttccgctgccgccgcggcagctgcagcaggtccaggagcccgtagacaaggtccgggctcacaaggtccaggatctggtggacaacaaggaccaggtggccaaggcccatacggatctggacaacagggtcctggtggagctggtcaacagggtccgggcggtcagggcccctacggtccaggagcagcagctgctgcggctgctgcagcaggaggatatggacctggagccggtcaacagggacctggaggtgctggccagcagggtcctggttctcagggaccaggtggtcagggtccatacggcccaggcgccggtcagcaaggaccaggttcacaaggcccaggctctggaggtcagcaaggacccggaggtcaaggtccttatggtccaagtgccgctgctgctgctgctgcagctgcaggaggatacggtccgggagctggtcagcaaggacctggttcgcaaggtcctggtagtggtggccaacaaggtccaggtggtcaaggaccgtacggtccaggagctgcagctgccgccgctgctgtaggaggatacggtccaggtgctggtcaacaaggtcctggaagtcaaggtccaggatccggaggtcagcagggacctggtggacaaggaccttatggtccttctgcagcagctgcagcggctgccgctggtggatatggtcctggagctggacagcagggcccaggatctcagggcccgggttctggaggacaacaaggacctggtggacagggtccatacggaccttccgctgccgccgcggcagctgcagcaggtccaggagcccgtagacaaggtccgggctcacaaggtccaggatctggtggacaacaaggaccaggtggccaaggcccatacggatctggacaacagggtcctggtggagctggtcaacagggtccgggcggtcagggcccctacggtccaggagcagcagctgctgcggctgctgcagcaggaggatatggacctggagccggtcaacagggacctggaggtgctggccagcagggtcctggttctcagggaccaggtggtcagggtccatacggcccaggcgccggtcagcaaggaccaggttcacaaggcccaggctctggaggtcagcaaggacccggaggtcaaggtccttatggtccaagtgccgctgctgctgctgctgcagctgcaggaggatacggtccgggagctggtcagcaaggacctggttcgcaaggtcctggtagtggtggccaacaaggtccaggtggtcaaggaccgtacggtccaggagctgcagctgccgccgctgctgtaggaggatacggtccaggtgctggtcaacaaggtcctggaagtcaaggtccaggatccggaggtcagcagggacctggtggacaaggaccttatggtccttctgcagcagctgcagcggctgccgctggtggatatggtcctggagctggacagcagggcccaggatctcagggcccgggttctggaggacaacaaggacctggtggacagggtccatacggaccttccgctgccgccgcggcagctgcagcaggtgactacaaagatgacgacgataaagattacaaagacgatgacgataaggactataaagatgatgacgacaaataataa

SEQ ID NO: 2761 - DNA, 2028 bp, synthetic construct
  misc_feature 1..2028: note = Description of Artificial Sequence: Synthetic polynucleotide
  source 1..2028: mol_type = other DNA
atgagatttccttcaatttttactgctgttttattcgcagcatcctccgcattagctgctccagtcaacactacaacagaagatgaaacggcacaaattccggctgaagctgtcatcggttactcagatttagaaggggatttcgatgttgctgttttgccattttccaacagcacaaataacgggttattgtttataaatactactattgccagcattgctgctaaagaagaaggggtatctctcgagaaaagagaggctgaagcaggtccaggttatggaccaggagctggtcagcagggccctggttccggtggacaacaaggtggaccaggctctggccaacagggcccaggtggtgccggtcaaggaggacctagaggtcaaggtccatatggtccaggtgcagctgccgccgccgcagctgcagctggtggatatggaccaggtgctggccagcagggaccaggttctcagggacctggtagcggtggccaacagggaccaggaagtcagggcccatatggacctagtgctgctgcagctgctgctgccgcgggtccgggatatggcccaggagcaggacagcaaggccctggctctcaaggccctggttcaggtggacagcaaggtccaggaggacaaggaccttatggtccatctgcagctgctgccgctgcagcagcaggtccaggttatggaccaggagctggtcagcagggccctggttccggtggacaacaaggtggaccaggctctggccaacagggcccaggtggtgccggtcaaggaggacctagaggtcaaggtccatatggtccaggtgcagctgccgccgccgcagctgcagctggtggatatggaccaggtgctggccagcagggaccaggttctcagggacctggtagcggtggccaacagggaccaggaagtcagggcccatatggacctagtgctgctgcagctgctgctgccgcgggtccgggatatggcccaggagcaggacagcaaggccctggctctcaaggccctggttcaggtggacagcaaggtccaggaggacaaggaccttatggtccatctgcagctgctgccgctgcagcagcaggtccaggttatggaccaggagctggtcagcagggccctggttccggtggacaacaaggtggaccaggctctggccaacagggcccaggtggtgccggtcaaggaggacctagaggtcaaggtccatatggtccaggtgcagctgccgccgccgcagctgcagctggtggatatggaccaggtgctggccagcagggaccaggttctcagggacctggtagcggtggccaacagggaccaggaagtcagggcccatatggacctagtgctgctgcagctgctgctgccgcgggtccgggatatggcccaggagcaggacagcaaggccctggctctcaaggccctggttcaggtggacagcaaggtccaggaggacaaggaccttatggtccatctgcagctgctgccgctgcagcagcaggtccaggttatggaccaggagctggtcagcagggccctggttccggtggacaacaaggtggaccaggctctggccaacagggcccaggtggtgccggtcaaggaggacctagaggtcaaggtccatatggtccaggtgcagctgccgccgccgcagctgcagctggtggatatggaccaggtgctggccagcagggaccaggttctcagggacctggtagcggtggccaacagggaccaggaagtcagggcccatatggacctagtgctgctgcagctgctgctgccgcgggtccgggatatggcccaggagcaggacagcaaggccctggctctcaaggccctggttcaggtggacagcaaggtccaggaggacaaggaccttatggtccatctgcagctgctgccgctgcagcagcaggtgactacaaagatgacgacgataaagattacaaagacgatgacgataaggactataaagatgatgacgacaaataataa

SEQ ID NO: 2762 - DNA, 2028 bp, synthetic construct
  misc_feature 1..2028: note = Description of Artificial Sequence: Synthetic polynucleotide
  source 1..2028: mol_type = other DNA
atgagatttccttcaatttttactgctgttttattcgcagcatcctccgcattagctgctccagtcaacactacaacagaagatgaaacggcacaaattccggctgaagctgtcatcggttactcagatttagaaggggatttcgatgttgctgttttgccattttccaacagcacaaataacgggttattgtttataaatactactattgccagcattgctgctaaagaagaaggggtatctctcgagaaaagagaggctgaagcaggtccaggatatggaccaggtgcaggacagcagggaccgggatcaggaggacaacaaggcggtcaaggttcaggtcaacaaggtccaggaggtgctggccagggaggtcctagaggtcaaggaccatatggacctggtgccgctgcggctgccgcagctgcagcaggtggttacggtccaggtgccggacagcaaggcccaggatcacagggtccaggttctggtggtcagcagggtccgggttcgcaaggaccctatggtccatcagccgcagctgctgctgccgcagctggtccaggttacggacctggtgctggccaacaaggaccaggcagtcagggtccaggtagtggtggtcaacaaggcccaggtggtcaaggaccttacggtccatctgctgctgccgctgctgcggcagcaggtccaggatatggaccaggtgcaggacagcagggaccgggatcaggaggacaacaaggcggtcaaggttcaggtcaacaaggtccaggaggtgctggccagggaggtcctagaggtcaaggaccatatggacctggtgccgctgcggctgccgcagctgcagcaggtggttacggtccaggtgccggacagcaaggcccaggatcacagggtccaggttctggtggtcagcagggtccgggttcgcaaggaccctatggtccatcagccgcagctgctgctgccgcagctggtccaggttacggacctggtgctggccaacaaggaccaggcagtcagggtccaggtagtggtggtcaacaaggcccaggtggtcaaggaccttacggtccatctgctgctgccgctgctgcggcagcaggtccaggatatggaccaggtgcaggacagcagggaccgggatcaggaggacaacaaggcggtcaaggttcaggtcaacaaggtccaggaggtgctggccagggaggtcctagaggtcaaggaccatatggacctggtgccgctgcggctgccgcagctgcagcaggtggttacggtccaggtgccggacagcaaggcccaggatcacagggtccaggttctggtggtcagcagggtccgggttcgcaaggaccctatggtccatcagccgcagctgctgctgccgcagctggtccaggttacggacctggtgctggccaacaaggaccaggcagtcagggtccaggtagtggtggtcaacaaggcccaggtggtcaaggaccttacggtccatctgctgctgccgctgctgcggcagcaggtccaggatatggaccaggtgcaggacagcagggaccgggatcaggaggacaacaaggcggtcaaggttcaggtcaacaaggtccaggaggtgctggccagggaggtcctagaggtcaaggaccatatggacctggtgccgctgcggctgccgcagctgcagcaggtggttacggtccaggtgccggacagcaaggcccaggatcacagggtccaggttctggtggtcagcagggtccgggttcgcaaggaccctatggtccatcagccgcagctgctgctgccgcagctggtccaggttacggacctggtgctggccaacaaggaccaggcagtcagggtccaggtagtggtggtcaacaaggcccaggtggtcaaggaccttacggtccatctgctgctgccgctgctgcggcagcaggtgactacaaagatgacgacgataaagattacaaagacgatgacgataaggactataaagatgatgacgacaaataataa

SEQ ID NO: 2763 - DNA, 2016 bp, synthetic construct
  misc_feature 1..2016: note = Description of Artificial Sequence: Synthetic polynucleotide
  source 1..2016: mol_type = other DNA
atgagatttccttcaatttttactgctgttttattcgcagcatcctccgcattagctgctccagtcaacactacaacagaagatgaaacggcacaaattccggctgaagctgtcatcggttactcagatttagaaggggatttcgatgttgctgttttgccattttccaacagcacaaataacgggttattgtttataaatactactattgccagcattgctgctaaagaagaaggggtatctctcgagaaaagagaggctgaagcaggtcctggttatggacccggtgccggacaacaaggaccgggttcaggtggccagcaaggaggtcaaggttcaggacaacaaggtcctggtggtgctggacagggaggacctagaggtcaaggaccctacggtccaggagcagcagctgcggccgctgctgctggaggatacggtccaggtgcaggacagcaaggacctggctcacagggaccaggcagtggaggacaacagggacctggctctcaaggtccgtatggtccaagtgctgccgcggcagcggctgctgccggtccaggttacggccctggtgcaggtcaacagggcccaggttcacaaggtcctggttctggtggacagcagggtccaggttctcaaggaccttatggtccatctgccgcagctgccgcagctgctgcaggtcctggttatggacccggtgccggacaacaaggaccgggttcaggtggccagcaaggaggtcaaggttcaggacaacaaggtcctggtggtgctggacagggaggacctagaggtcaaggaccctacggtccaggagcagcagctgcggccgctgctgctggaggatacggtccaggtgcaggacagcaaggacctggctcacagggaccaggcagtggaggacaacagggacctggctctcaaggtccgtatggtccaagtgctgccgcggcagcggctgctgccggtccaggttacggccctggtgcaggtcaacagggcccaggttcacaaggtcctggttctggtggacagcagggtccaggttctcaaggaccttatggtccatctgccgcagctgccgcagctgctgcaggtcctggttatggacccggtgccggacaacaaggaccgggttcaggtggccagcaaggaggtcaaggttcaggacaacaaggtcctggtggtgctggacagggaggacctagaggtcaaggaccctacggtccaggagcagcagctgcggccgctgctgctggaggatacggtccaggtgcaggacagcaaggacctggctcacagggaccaggcagtggaggacaacagggacctggctctcaaggtccgtatggtccaagtgctgccgcggcagcggctgctgccggtccaggttacggccctggtgcaggtcaacagggcccaggttcacaaggtcctggttctggtggacagcagggtccaggttctcaaggaccttatggtccatctgccgcagctgccgcagctgctgcaggtcctggttatggacccggtgccggacaacaaggaccgggttcaggtggccagcaaggaggtcaaggttcaggacaacaaggtcctggtggtgctggacagggaggacctagaggtcaaggaccctacggtccaggagcagcagctgcggccgctgctgctggaggatacggtccaggtgcaggacagcaaggacctggctcacagggaccaggcagtggaggacaacagggacctggctctcaaggtccgtatggtccaagtgctgccgcggcagcggctgctgccggtccaggttacggccctggtgcaggtcaacagggcccaggttcacaaggtcctggttctggtggacagcagggtccaggttctcaaggaccttatggtccatctgccgcagctgccgcagctgctgcaggtgactacaaagatgacgacgataaagattacaaagacgatgacgataaggactataaagatgatgacgacaaataataa

SEQ ID NO: 2764 - DNA, 3180 bp, synthetic construct
  misc_feature 1..3180: note = Description of Artificial Sequence: Synthetic polynucleotide
  source 1..3180: mol_type = other DNA
atgagatttccttcaatttttactgctgttttattcgcagcatcctccgcattagctgctccagtcaacactacaacagaagatgaaacggcacaaattccggctgaagctgtcatcggttactcagatttagaaggggatttcgatgttgctgttttgccattttccaacagcacaaataacgggttattgtttataaatactactattgccagcattgctgctaaagaagaaggggtatctctcgagaaaagagaggctgaagcaggtcctggaggttacggtggaccaggacagcagggtcctggtcaaggacaacaacaaggacctgcttcagctgccgcggccgctgctgccgctggacctggaggatatggtggacctggtcagcaaggacctggacaaggtcaacagcagggtcctgcaagcgctgccgcagcggctgccgccgctgcgggtcctggtggatacggaggacctggacagcagcgtcccggacaggctcaatacggtagaggtaccggtcaacaaggtcaaggtccaggtgctcaacaaggtccagctagtgcagctgccgcagctgcagctggagctggattatacggcggaccaggtcaacaaggccctggtcaaggtcagcaacaaggacccgcatcagcagcagctgccgctgccgctgctgccgcagctggaccaggcggatatggtggtccgggtcaacagggtccaggacaagcccaacagcaaggaccagcctctgctgctgctgccgctgctgctggcccaggaggctactccggaccaggacagcaaggtcctggacaggctcaacaacagggtccagcttcagccgctgccgccgccgccgctgccgctggtccaggtggttacggtggtcctggccaacagggtccaggtcaaggccaacaacagggacctgcttccgctgctgctgctgcagccgctaccgcagcaggtcctggaggttacggtggaccaggacagcagggtcctggtcaaggacaacaacaaggacctgcttcagctgccgcggccgctgctgccgctggacctggaggatatggtggacctggtcagcaaggacctggacaaggtcaacagcagggtcctgcaagcgctgccgcagcggctgccgccgctgcgggtcctggtggatacggaggacctggacagcagcgtcccggacaggctcaatacggtagaggtaccggtcaacaaggtcaaggtccaggtgctcaacaaggtccagctagtgcagctgccgcagctgcagctggagctggattatacggcggaccaggtcaacaaggccctggtcaaggtcagcaacaaggacccgcatcagcagcagctgccgctgccgctgctgccgcagctggaccaggcggatatggtggtccgggtcaacagggtccaggacaagcccaacagcaaggaccagcctctgctgctgctgccgctgctgctggcccaggaggctactccggaccaggacagcaaggtcctggacaggctcaacaacagggtccagcttcagccgctgccgccgccgccgctgccgctggtccaggtggttacggtggtcctggccaacagggtccaggtcaaggccaacaacagggacctgcttccgctgctgctgctgcagccgctaccgcagcaggtcctggaggttacggtggaccaggacagcagggtcctggtcaaggacaacaacaaggacctgcttcagctgccgcggccgctgctgccgctggacctggaggatatggtggacctggtcagcaaggacctggacaaggtcaacagcagggtcctgcaagcgctgccgcagcggctgccgccgctgcgggtcctggtggatacggaggacctggacagcagcgtcccggacaggctcaatacggtagaggtaccggtcaacaaggtcaaggtccaggtgctcaacaaggtccagctagtgcagctgccgcagctgcagctggagctggattatacggcggaccaggtcaacaaggccctggtcaaggtcagcaacaaggacccgcatcagcagcagctgccgctgccgctgctgccgcagctggaccaggcggatatggtggtccgggtcaacagggtccaggacaagcccaacagcaaggaccagcctctgctgctgctgccgctgctgctggcccaggaggctactccggaccaggacagcaaggtcctggacaggctcaacaacagggtccagcttcagccgctgccgccgccgccgctgccgctggtccaggtggttacggtggtcctggccaacagggtccaggtcaaggccaacaacagggacctgcttccgctgctgctgctgcagccgctaccgcagcaggtcctggaggttacggtggaccaggacagcagggtcctggtcaaggacaacaacaaggacctgcttcagctgccgcggccgctgctgccgctggacctggaggatatggtggacctggtcagcaaggacctggacaaggtcaacagcagggtcctgcaagcgctgccgcagcggctgccgccgctgcgggtcctggtggatacggaggacctggacagcagcgtcccggacaggctcaatacggtagaggtaccggtcaacaaggtcaaggtccaggtgctcaacaaggtccagctagtgcagctgccgcagctgcagctggagctggattatacggcggaccaggtcaacaaggccctggtcaaggtcagcaacaaggacccgcatcagcagcagctgccgctgccgctgctgccgcagctggaccaggcggatatggtggtccgggtcaacagggtccaggacaagcccaacagcaaggaccagcctctgctgctgctgccgctgctgctggcccaggaggctactccggaccaggacagcaaggtcctggacaggctcaacaacagggtccagcttcagccgctgccgccgccgccgctgccgctggtccaggtggttacggtggtcctggccaacagggtccaggtcaaggccaacaacagggacctgcttccgctgctgctgctgcagccgctaccgcagcaggtgactacaaagatgacgacgataaagattacaaagacgatgacgataaggactataaagatgatgacgacaaataataa

SEQ ID NO: 2765 - DNA, 3084 bp, synthetic construct
  misc_feature 1..3084: note = Description of Artificial Sequence: Synthetic polynucleotide
  source 1..3084: mol_type = other DNA
atgagatttccttcaatttttactgctgttttattcgcagcatcctccgcattagctgctccagtcaacactacaacagaagatgaaacggcacaaattccggctgaagctgtcatcggttactcagatttagaaggggatttcgatgttgctgttttgccattttccaacagcacaaataacgggttattgtttataaatactactattgccagcattgctgctaaagaagaaggggtatctctcgagaaaagagaggctgaagcaggtccaggaggatacggtggtccaggtcaacagggacccggacagggtcaatatggtccaggtactggtcagcaaggacaaggaccgtctggacaacagggaccagcaggcgctgccgcagcagcagccgctgcggcaggtcctggaggttatggtggtccaggtcagcagggtccaggtcaaggacaatacggacctggtgctggacaacaaggccaaggtcctggtggccaacagggtccggcgggtgctgctgctgcagccgctgctgctgcaggacccggtggttatggaggtccaggtcaacaaggacctggccaaggacaacaacaaggtagggcaggagcagcggctgcggccgctgctggaccaggaggctacggaggtccaggacagcaaggtcctggtcaagcacagcaacaaggaccggcagcagccgctagtgctggacctggtggttacggtggtcctggtcaacaaggacccggtcaaggtcaacagaagggacctgcatcagctgcagctgcagctgctgccacagcagccggtccaggaggatatggcggtcctggtcaacagggtcctggtcaaggccagtacggccctggtaccggtcaacagggtcaaggtccaggtggtcaacaaggtcctgcatcagctgccgccgctgcagctgctgctgcaggtccaggaggatacggtggtccaggtcaacagggacccggacagggtcaatatggtccaggtactggtcagcaaggacaaggaccgtctggacaacagggaccagcaggcgctgccgcagcagcagccgctgcggcaggtcctggaggttatggtggtccaggtcagcagggtccaggtcaaggacaatacggacctggtgctggacaacaaggccaaggtcctggtggccaacagggtccggcgggtgctgctgctgcagccgctgctgctgcaggacccggtggttatggaggtccaggtcaacaaggacctggccaaggacaacaacaaggtagggcaggagcagcggctgcggccgctgctggaccaggaggctacggaggtccaggacagcaaggtcctggtcaagcacagcaacaaggaccggcagcagccgctagtgctggacctggtggttacggtggtcctggtcaacaaggacccggtcaaggtcaacagaagggacctgcatcagctgcagctgcagctgctgccacagcagccggtccaggaggatatggcggtcctggtcaacagggtcctggtcaaggccagtacggccctggtaccggtcaacagggtcaaggtccaggtggtcaacaaggtcctgcatcagctgccgccgctgcagctgctgctgcaggtccaggaggatacggtggtccaggtcaacagggacccggacagggtcaatatggtccaggtactggtcagcaaggacaaggaccgtctggacaacagggaccagcaggcgctgccgcagcagcagccgctgcggcaggtcctggaggttatggtggtccaggtcagcagggtccaggtcaaggacaatacggacctggtgctggacaacaaggccaaggtcctggtggccaacagggtccggcgggtgctgctgctgcagccgctgctgctgcaggacccggtggttatggaggtccaggtcaacaaggacctggccaaggacaacaacaaggtagggcaggagcagcggctgcggccgctgctggaccaggaggctacggaggtccaggacagcaaggtcctggtcaagcacagcaacaaggaccggcagcagccgctagtgctggacctggtggttacggtggtcctggtcaacaaggacccggtcaaggtcaacagaagggacctgcatcagctgcagctgcagctgctgccacagcagccggtccaggaggatatggcggtcctggtcaacagggtcctggtcaaggccagtacggccctggtaccggtcaacagggtcaaggtccaggtggtcaacaaggtcctgcatcagctgccgccgctgcagctgctgctgcaggtccaggaggatacggtggtccaggtcaacagggacccggacagggtcaatatggtccaggtactggtcagcaaggacaaggaccgtctggacaacagggaccagcaggcgctgccgcagcagcagccgctgcggcaggtcctggaggttatggtggtccaggtcagcagggtccaggtcaaggacaatacggacctggtgctggacaacaaggccaaggtcctggtggccaacagggtccggcgggtgctgctgctgcagccgctgctgctgcaggacccggtggttatggaggtccaggtcaacaaggacctggccaaggacaacaacaaggtagggcaggagcagcggctgcggccgctgctggaccaggaggctacggaggtccaggacagcaaggtcctggtcaagcacagcaacaaggaccggcagcagccgctagtgctggacctggtggttacggtggtcctggtcaacaaggacccggtcaaggtcaacagaagggacctgcatcagctgcagctgcagctgctgccacagcagccggtccaggaggatatggcggtcctggtcaacagggtcctggtcaaggccagtacggccctggtaccggtcaacagggtcaaggtccaggtggtcaacaaggtcctgcatcagctgccgccgctgcagctgctgctgcaggtgactacaaagatgacgacgataaagattacaaagacgatgacgataaggactataaagatgatgacgacaaataataa

SEQ ID NO: 2766 - DNA, 3276 bp, synthetic construct; identical to SEQ ID NO: 1468
  misc_feature 1..3276: note = Description of Artificial Sequence: Synthetic polynucleotide
  source 1..3276: mol_type = other DNA

SEQ ID NO: 2767 - DNA, 3096 bp, synthetic construct
  misc_feature 1..3096: note = Description of Artificial Sequence: Synthetic polynucleotide
  source 1..3096: mol_type = other DNA
atgagatttccttcaatttttactgctgttttattcgcagcatcctccgcattagctgctccagtcaacactacaacagaagatgaaacggcacaaattccggctgaagctgtcatcggttactcagatttagaaggggatttcgatgttgctgttttgccattttccaacagcacaaataacgggttattgtttataaatactactattgccagcattgctgctaaagaagaaggggtatctctcgagaaaagagaggctgaagcaggtccaggaggatacggaggaccaggtcaacaaggtccgggtcaaggccagtatggaccaggaactggacaacaaggacaaggaccaggtggacagcagggaccagttggagctgctgcggctgcagctgcggctgtgtctagtggtggttatggttcccagggtgctggtcagggtggccaacaaggctctggacagagaggtccagctgccgctggaccaggcggttattccggtccgggtcaacagggccccggacaaggtggccaacaaggaccagcatccgccgctgctgcagctgctgccgctgcaggtcctggtggatatggtggttccggccagcagggtcctggacaaggacgaggaactggtcaacagggtcaaggtccaggcggtcaacaaggtcctgcttcggcggccgccgcagctgccgccggacctggaggatatggaggtcccggtcaacaaggcccaggtcaaggtcaatatggacctggtactggacagcagggccaaggtcccgcttctgctgctgctgcagccgccgctggacctggtggatatggcggaccaggtcagcaaggtcctggtcagggtcaatacggtccaggtactggacagcaaggccaaggtccaggtggtcagcaaggaccgggaggagcaagtgctgctgcagctgcagcagcaggtccaggaggatacggaggaccaggtcaacaaggtccgggtcaaggccagtatggaccaggaactggacaacaaggacaaggaccaggtggacagcagggaccagttggagctgctgcggctgcagctgcggctgtgtctagtggtggttatggttcccagggtgctggtcagggtggccaacaaggctctggacagagaggtccagctgccgctggaccaggcggttattccggtccgggtcaacagggccccggacaaggtggccaacaaggaccagcatccgccgctgctgcagctgctgccgctgcaggtcctggtggatatggtggttccggccagcagggtcctggacaaggacgaggaactggtcaacagggtcaaggtccaggcggtcaacaaggtcctgcttcggcggccgccgcagctgccgccggacctggaggatatggaggtcccggtcaacaaggcccaggtcaaggtcaatatggacctggtactggacagcagggccaaggtcccgcttctgctgctgctgcagccgccgctggacctggtggatatggcggaccaggtcagcaaggtcctggtcagggtcaatacggtccaggtactggacagcaaggccaaggtccaggtggtcagcaaggaccgggaggagcaagtgctgctgcagctgcagcagcaggtccaggaggatacggaggaccaggtcaacaaggtccgggtcaaggccagtatggaccaggaactggacaacaaggacaaggaccaggtggacagcagggaccagttggagctgctgcggctgcagctgcggctgtgtctagtggtggttatggttcccagggtgctggtcagggtggccaacaaggctctggacagagaggtccagctgccgctggaccaggcggttattccggtccgggtcaacagggccccggacaaggtggccaacaaggaccagcatccgccgctgctgcagctgctgccgctgcaggtcctggtggatatggtggttccggccagcagggtcctggacaaggacgaggaactggtcaacagggtcaaggtccaggcggtcaacaaggtcctgcttcggcggccgccgcagctgccgccggacctggaggatatggaggtcccggtcaacaaggcccaggtcaaggtcaatatggacctggtactggacagcagggccaaggtcccgcttctgctgctgctgcagccgccgctggacctggtggatatggcggaccaggtcagcaaggtcctggtcagggtcaatacggtccaggtactggacagcaaggccaaggtccaggtggtcagcaaggaccgggaggagcaagtgctgctgcagctgcagcagcaggtccaggaggatacggaggaccaggtcaacaaggtccgggtcaaggccagtatggaccaggaactggacaacaaggacaaggaccaggtggacagcagggaccagttggagctgctgcggctgcagctgcggctgtgtctagtggtggttatggttcccagggtgctggtcagggtggccaacaaggctctggacagagaggtccagctgccgctggaccaggcggttattccggtccgggtcaacagggccccggacaaggtggccaacaaggaccagcatccgccgctgctgcagctgctgccgctgcaggtcctggtggatatggtggttccggccagcagggtcctggacaaggacgaggaactggtcaacagggtcaaggtccaggcggtcaacaaggtcctgcttcggcggccgccgcagctgccgccggacctggaggatatggaggtcccggtcaacaaggcccaggtcaaggtcaatatggacctggtactggacagcagggccaaggtcccgcttctgctgctgctgcagccgccgctggacctggtggatatggcggaccaggtcagcaaggtcctggtcagggtcaatacggtccaggtactggacagcaaggccaaggtccaggtggtcagcaaggaccgggaggagcaagtgctgctgcagctgcagcagcaggtgactacaaagatgacgacgataaagattacaaagacgatgacgataaggactataaagatgatgacgacaaataataa

SEQ ID NO: 2768 - DNA, 2940 bp, synthetic construct
  misc_feature 1..2940: note = Description of Artificial Sequence: Synthetic polynucleotide
  source 1..2940: mol_type = other DNA
atgagatttccttcaatttttactgctgttttattcgcagcatcctccgcattagctgctccagtcaacactacaacagaagatgaaacggcacaaattccggctgaagctgtcatcggttactcagatttagaaggggatttcgatgttgctgttttgccattttccaacagcacaaataacgggttattgtttataaatactactattgccagcattgctgctaaagaagaaggggtatctctcgagaaaagagaggctgaagcaggtcccggtggctatggacctggtcaacagggtcctggaggttatggtcccggtcaacaaggacctggaagatacggtccaggtcaacaaggaccatcaggtccaggaagtgcagccgcggctgctgctggttccggacaacagggacctggcggctacggaccacgtcaacagggtcccggtggttatggtcaaggccaacaaggtccatctggtccaggctcagctgcagcagcatctgctgcagccagcgctgagtcaggtcaacaaggtcccggtggatatggtccaggacaacaaggccctggtggatatggaccaggtcaacagggtccaggcggatacggccctggccagcaaggaccgtccggaccaggttctgcggccgctgcggctgcagctgcctcaggtcctggtcagcaaggtccaggaggctatggtcctggacagcaaggtccgggaggatatggacctggacaacaaggaccttctggacctggctctgctgcagcggctgctgccgcggcgtcgggtccaggacaacagggccctggaggatacggtccaggacagcaaggtccaggtggttatggtcctggtcagcagggactgtctggtcctggatctgctgctgctgcagcagctgcaggtcccggtggctatggacctggtcaacagggtcctggaggttatggtcccggtcaacaaggacctggaagatacggtccaggtcaacaaggaccatcaggtccaggaagtgcagccgcggctgctgctggttccggacaacagggacctggcggctacggaccacgtcaacagggtcccggtggttatggtcaaggccaacaaggtccatctggtccaggctcagctgcagcagcatctgctgcagccagcgctgagtcaggtcaacaaggtcccggtggatatggtccaggacaacaaggccctggtggatatggaccaggtcaacagggtccaggcggatacggccctggccagcaaggaccgtccggaccaggttctgcggccgctgcggctgcagctgcctcaggtcctggtcagcaaggtccaggaggctatggtcctggacagcaaggtccgggaggatatggacctggacaacaaggaccttctggacctggctctgctgcagcggctgctgccgcggcgtcgggtccaggacaacagggccctggaggatacggtccaggacagcaaggtccaggtggttatggtcctggtcagcagggactgtctggtcctggatctgctgctgctgcagcagctgcaggtcccggtggctatggacctggtcaacagggtcctggaggttatggtcccggtcaacaaggacctggaagatacggtccaggtcaacaaggaccatcaggtccaggaagtgcagccgcggctgctgctggttccggacaacagggacctggcggctacggaccacgtcaacagggtcccggtggttatggtcaaggccaacaaggtccatctggtccaggctcagctgcagcagcatctgctgcagccagcgctgagtcaggtcaacaaggtcccggtggatatggtccaggacaacaaggccctggtggatatggaccaggtcaacagggtccaggcggatacggccctggccagcaaggaccgtccggaccaggttctgcggccgctgcggctgcagctgcctcaggtcctggtcagcaaggtccaggaggctatggtcctggacagcaaggtccgggaggatatggacctggacaacaaggaccttctggacctggctctgctgcagcggctgctgccgcggcgtcgggtccaggacaacagggccctggaggatacggtccaggacagcaaggtccaggtggttatggtcctggtcagcagggactgtctggtcctggatctgctgctgctgcagcagctgcaggtcccggtggctatggacctggtcaacagggtcctggaggttatggtcccggtcaacaaggacctggaagatacggtccaggtcaacaaggaccatcaggtccaggaagtgcagccgcggctgctgctggttccggacaacagggacctggcggctacggaccacgtcaacagggtcccggtggttatggtcaaggccaacaaggtccatctggtccaggctcagctgcagcagcatctgctgcagccagcgctgagtcaggtcaacaaggtcccggtggatatggtccaggacaacaaggccctggtggatatggaccaggtcaacagggtccaggcggatacggccctggccagcaaggaccgtccggaccaggttctgcggccgctgcggctgcagctgcctcaggtcctggtcagcaaggtccaggaggctatggtcctggacagcaaggtccgggaggatatggacctggacaacaaggaccttctggacctggctctgctgcagcggctgctgccgcggcgtcgggtccaggacaacagggccctggaggatacggtccaggacagcaaggtccaggtggttatggtcctggtcagcagggactgtctggtcctggatctgctgctgctgcagcagctgcaggtgactacaaagatgacgacgataaagattacaaagacgatgacgataaggactataaagatgatgacgacaaataataa

SEQ ID NO: 2769 - DNA, 3048 bp, synthetic construct
  misc_feature 1..3048: note = Description of Artificial Sequence: Synthetic polynucleotide
  source 1..3048: mol_type = other DNA
atgagatttccttcaatttttactgctgttttattcgcagcatcctccgcattagctgctccagtcaacactacaacagaagatgaaacggcacaaattccggctgaagctgtcatcggttactcagatttagaaggggatttcgatgttgctgttttgccattttccaacagcacaaataacgggttattgtttataaatactactattgccagcattgctgctaaagaagaaggggtatctctcgagaaaagagaggctgaagcaggtagaggaccaggaggttatggtccaggtcagcagggaccgggtggacctggagcagctgcagcggctgccggtcccggaggttatggaccaggtggttacggtccaggtcaacaaggtcctggtggtccaggagccgctgccgctgctgccgccggccgcggtccaggtggttatggtccaggacaacaaggtcctggccaacaaggcccaggtggttccggtgctgcagctgcagctgcgggaagaggtccaggtggatacggaccgggtcaacaaggccctggtggaccaggtgccgccgccgctgctgctggtccaggtggatatggtcctggtcagcagggacctggtgctgctgcagcagccgccgcagctggtagaggtcccggtggatatggtccgggccagcagggaccaggaggccctggtgccgcagctgctgctgccgctggacgtggaccgggtggatacggtcctggtcagcaaggaccaggtcaacagggtccaggcggttccggtgcagctgccgctgccgctggaagaggaccaggcggatatggtcctggacaacaaggacctggaggacctggtgccgccgcagcagctgcaggtcctggaggatatggacctggtcaacaaggaccaggagcagcagcagccgccgccgctgcaggtagaggaccaggaggttatggtccaggtcagcagggaccgggtggacctggagcagctgcagcggctgccggtcccggaggttatggaccaggtggttacggtccaggtcaacaaggtcctggtggtccaggagccgctgccgctgctgccgccggccgcggtccaggtggttatggtccaggacaacaaggtcctggccaacaaggcccaggtggttccggtgctgcagctgcagctgcgggaagaggtccaggtggatacggaccgggtcaacaaggccctggtggaccaggtgccgccgccgctgctgctggtccaggtggatatggtcctggtcagcagggacctggtgctgctgcagcagccgccgcagctggtagaggtcccggtggatatggtccgggccagcagggaccaggaggccctggtgccgcagctgctgctgccgctggacgtggaccgggtggatacggtcctggtcagcaaggaccaggtcaacagggtccaggcggttccggtgcagctgccgctgccgctggaagaggaccaggcggatatggtcctggacaacaaggacctggaggacctggtgccgccgcagcagctgcaggtcctggaggatatggacctggtcaacaaggaccaggagcagcagcagccgccgccgctgcaggtagaggaccaggaggttatggtccaggtcagcagggaccgggtggacctggagcagctgcagcggctgccggtcccggaggttatggaccaggtggttacggtccaggtcaacaaggtcctggtggtccaggagccgctgccgctgctgccgccggccgcggtccaggtggttatggtccaggacaacaaggtcctggccaacaaggcccaggtggttccggtgctgcagctgcagctgcgggaagaggtccaggtggatacggaccgggtcaacaaggccctggtggaccaggtgccgccgccgctgctgctggtccaggtggatatggtcctggtcagcagggacctggtgctgctgcagcagccgccgcagctggtagaggtcccggtggatatggtccgggccagcagggaccaggaggccctggtgccgcagctgctgctgccgctggacgtggaccgggtggatacggtcctggtcagcaaggaccaggtcaacagggtccaggcggttccggtgcagctgccgctgccgctggaagaggaccaggcggatatggtcctggacaacaaggacctggaggacctggtgccgccgcagcagctgcaggtcctggaggatatggacctggtcaacaaggaccaggagcagcagcagccgccgccgctgcaggtagaggaccaggaggttatggtccaggtcagcagggaccgggtggacctggagcagctgcagcggctgccggtcccggaggttatggaccaggtggttacggtccaggtcaacaaggtcctggtggtccaggagccgctgccgctgctgccgccggccgcggtccaggtggttatggtccaggacaacaaggtcctggccaacaaggcccaggtggttccggtgctgcagctgcagctgcgggaagaggtccaggtggatacggaccgggtcaacaaggccctggtggaccaggtgccgccgccgctgctgctggtccaggtggatatggtcctggtcagcagggacctggtgctgctgcagcagccgccgcagctggtagaggtcccggtggatatggtccgggccagcagggaccaggaggccctggtgccgcagctgctgctgccgctggacgtggaccgggtggatacggtcctggtcagcaaggaccaggtcaacagggtccaggcggttccggtgcagctgccgctgccgctggaagaggaccaggcggatatggtcctggacaacaaggacctggaggacctggtgccgccgcagcagctgcaggtcctggaggatatggacctggtcaacaaggaccaggagcagcagcagccgccgccgctgcaggtgactacaaagatgacgacgataaagattacaaagacgatgacgataaggactataaagatgatgacgacaaataataa

SEQ ID NO: 2770 - DNA, 3048 bp, synthetic construct
  misc_feature 1..3048: note = Description of Artificial Sequence: Synthetic polynucleotide
  source 1..3048: mol_type = other DNA
atgagatttccttcaatttttactgctgttttattcgcagcatcctccgcattagctgctccagtcaacactacaacagaagatgaaacggcacaaattccggctgaagctgtcatcggttactcagatttagaaggggatttcgatgttgctgttttgccattttccaacagcacaaataacgggttattgtttataaatactactattgccagcattgctgctaaagaagaaggggtatctctcgagaaaagagaggctgaagcaggtcgtggtccgggaggatacggtccaggacagcaaggtccgggtggatctggcgccgcagcagctgctgctggaagaggtccaggaggttatggtccaggacagcagggaccaggtggtccaggagcagctgcagccgctgctggtcctggtggttacggtccaggacaacaaggcacgggtgctgcggctgccgcagcagctggttctggtgccggaggttacggtcctggacagcagggcccaggtggtcctggtgctgccgcagcagcagctggacctggaggatacggccccggacagcaaggcccaggtgcagcagccgctgccgctgctggaagtggtccaggcggatatggtccaggtcaacaaggtcctggtggttcttctgctgccgccgcagccgcaggtccaggtagatacggaccgggtcagcaaggtccaggtgcagccgctgctgcttctgctggccgtggtccaggaggttacggtccgggccaacaaggtccaggcggtcctggtgccgctgctgcagctgccggtcctggaggttatggccctggtcaacaaggccctggagccgctgctgccgctgctgcaggatcaggtccaggcggatacggacctggtcagcaaggtcccggaggtccaggagctgcagctgccgcagctgcaggtcgtggtccgggaggatacggtccaggacagcaaggtccgggtggatctggcgccgcagcagctgctgctggaagaggtccaggaggttatggtccaggacagcagggaccaggtggtccaggagcagctgcagccgctgctggtcctggtggttacggtccaggacaacaaggcacgggtgctgcggctgccgcagcagctggttctggtgccggaggttacggtcctggacagcagggcccaggtggtcctggtgctgccgcagcagcagctggacctggaggatacggccccggacagcaaggcccaggtgcagcagccgctgccgctgctggaagtggtccaggcggatatggtccaggtcaacaaggtcctggtggttcttctgctgccgccgcagccgcaggtccaggtagatacggaccgggtcagcaaggtccaggtgcagccgctgctgcttctgctggccgtggtccaggaggttacggtccgggccaacaaggtccaggcggtcctggtgccgctgctgcagctgccggtcctggaggttatggccctggtcaacaaggccctggagccgctgctgccgctgctgcaggatcaggtccaggcggatacggacctggtcagcaaggtcccggaggtccaggagctgcagctgccgcagctgcaggtcgtggtccgggaggatacggtccaggacagcaaggtccgggtggatctggcgccgcagcagctgctgctggaagaggtccaggaggttatggtccaggacagcagggaccaggtggtccaggagcagctgcagccgctgctggtcctggtggttacggtccaggacaacaaggcacgggtgctgcggctgccgcagcagctggttctggtgccggaggttacggtcctggacagcagggcccaggtggtcctggtgctgccgcagcagcagctggacctggaggatacggccccggacagcaaggcccaggtgcagcagccgctgccgctgctggaagtggtccaggcggatatggtccaggtcaacaaggtcctggtggttcttctgctgccgccgcagccgcaggtccaggtagatacggaccgggtcagcaaggtccaggtgcagccgctgctgcttctgctggccgtggtccaggaggttacggtccgggccaacaaggtccaggcggtcctggtgccgctgctgcagctgccggtcctggaggttatggccctggtcaacaaggccctggagccgctgctgccgctgctgcaggatcaggtccaggcggatacggacctggtcagcaaggtcccggaggtccaggagctgcagctgccgcagctgcaggtcgtggtccgggaggatacggtccaggacagcaaggtccgggtggatctggcgccgcagcagctgctgctggaagaggtccaggaggttatggtccaggacagcagggaccaggtggtccaggagcagctgcagccgctgctggtcctggtggttacggtccaggacaacaaggcacgggtgctgcggctgccgcagcagctggttctggtgccggaggttacggtcctggacagcagggcccaggtggtcctggtgctgccgcagcagcagctggacctggaggatacggccccggacagcaaggcccaggtgcagcagccgctgccgctgctggaagtggtccaggcggatatggtccaggtcaacaaggtcctggtggttcttctgctgccgccgcagccgcaggtccaggtagatacggaccgggtcagcaaggtccaggtgcagccgctgctgcttctgctggccgtggtccaggaggttacggtccgggccaacaaggtccaggcggtcctggtgccgctgctgcagctgccggtcctggaggttatggccctggtcaacaaggccctggagccgctgctgccgctgctgcaggatcaggtccaggcggatacggacctggtcagcaaggtcccggaggtccaggagctgcagctgccgcagctgcaggtgactacaaagatgacgacgataaagattacaaagacgatgacgataaggactataaagatgatgacgacaaataataa

SEQ ID NO: 2771 - DNA, 2940 bp, synthetic construct
  misc_feature 1..2940: note = Description of Artificial Sequence: Synthetic polynucleotide
  source 1..2940: mol_type = other DNA
atgagatttccttcaatttttactgctgttttattcgcagcatcctccgcattagctgctccagtcaacactacaacagaagatgaaacggcacaaattccggctgaagctgtcatcggttactcagatttagaaggggatttcgatgttgctgttttgccattttccaacagcacaaataacgggttattgtttataaatactactattgccagcattgctgctaaagaagaaggggtatctctcgagaaaagagaggctgaagcaggtcgtggtcctggtggctatggacaaggtcagcaaggacccggcggacctggcgcagcagctgccgcggccggtccaggtggttatggacctggacaacaaggacctggagcagcagcagctgcagccgctggatctggccctggtggatatggacctggtcagcaaggaccaggacgttcaggtgcagctgctgcagcagccgcagctggtcgtggtccaggtggatatggtccaggacagcagggcccaggaggccctggtgccgcagcggccgctgccggtcctggtggttatggtccaggccaacaaggtcctggtgcagctgcagcagctagtgctggtcgaggacctggtggatatggtcctggacaacaaggtccgggtggatccggagccgctgctgctgcagccggtagaggtcccggtggatacggtccgggtcaacaaggtccaggtggtcctggagctgctgctgcagctgccgctggccgtggtccaggtggctacggaccaggtcaacaaggccctggtcagcagggtcctggaggaagcggtgctgcggctgccgccgctggtcgtggccctggcggatacggtccaggtcaacagggaccaggtggtccaggtgctgctgctgctgccgcaggtcgtggtcctggtggctatggacaaggtcagcaaggacccggcggacctggcgcagcagctgccgcggccggtccaggtggttatggacctggacaacaaggacctggagcagcagcagctgcagccgctggatctggccctggtggatatggacctggtcagcaaggaccaggacgttcaggtgcagctgctgcagcagccgcagctggtcgtggtccaggtggatatggtccaggacagcagggcccaggaggccctggtgccgcagcggccgctgccggtcctggtggttatggtccaggccaacaaggtcctggtgcagctgcagcagctagtgctggtcgaggacctggtggatatggtcctggacaacaaggtccgggtggatccggagccgctgctgctgcagccggtagaggtcccggtggatacggtccgggtcaacaaggtccaggtggtcctggagctgctgctgcagctgccgctggccgtggtccaggtggctacggaccaggtcaacaaggccctggtcagcagggtcctggaggaagcggtgctgcggctgccgccgctggtcgtggccctggcggatacggtccaggtcaacagggaccaggtggtccaggtgctgctgctgctgccgcaggtcgtggtcctggtggctatggacaaggtcagcaaggacccggcggacctggcgcagcagctgccgcggccggtccaggtggttatggacctggacaacaaggacctggagcagcagcagctgcagccgctggatctggccctggtggatatggacctggtcagcaaggaccaggacgttcaggtgcagctgctgcagcagccgcagctggtcgtggtccaggtggatatggtccaggacagcagggcccaggaggccctggtgccgcagcggccgctgccggtcctggtggttatggtccaggccaacaaggtcctggtgcagctgcagcagctagtgctggtcgaggacctggtggatatggtcctggacaacaaggtccgggtggatccggagccgctgctgctgcagccggtagaggtcccggtggatacggtccgggtcaacaaggtccaggtggtcctggagctgctgctgcagctgccgctggccgtggtccaggtggctacggaccaggtcaacaaggccctggtcagcagggtcctggaggaagcggtgctgcggctgccgccgctggtcgtggccctggcggatacggtccaggtcaacagggaccaggtggtccaggtgctgctgctgctgccgcaggtcgtggtcctggtggctatggacaaggtcagcaaggacccggcggacctggcgcagcagctgccgcggccggtccaggtggttatggacctggacaacaaggacctggagcagcagcagctgcagccgctggatctggccctggtggatatggacctggtcagcaaggaccaggacgttcaggtgcagctgctgcagcagccgcagctggtcgtggtccaggtggatatggtccaggacagcagggcccaggaggccctggtgccgcagcggccgctgccggtcctggtggttatggtccaggccaacaaggtcctggtgcagctgcagcagctagtgctggtcgaggacctggtggatatggtcctggacaacaaggtccgggtggatccggagccgctgctgctgcagccggtagaggtcccggtggatacggtccgggtcaacaaggtccaggtggtcctggagctgctgctgcagctgccgctggccgtggtccaggtggctacggaccaggtcaacaaggccctggtcagcagggtcctggaggaagcggtgctgcggctgccgccgctggtcgtggccctggcggatacggtccaggtcaacagggaccaggtggtccaggtgctgctgctgctgccgcaggtgactacaaagatgacgacgataaagattacaaagacgatgacgataaggactataaagatgatgacgacaaataataa

SEQ ID NO: 2772 - DNA, 3036 bp, synthetic construct
  misc_feature 1..3036: note = Description of Artificial Sequence: Synthetic polynucleotide
  source 1..3036: mol_type = other DNA
atgagatttccttcaatttttactgctgttttattcgcagcatcctccgcattagctgctccagtcaacactacaacagaagatgaaacggcacaaattccggctgaagctgtcatcggttactcagatttagaaggggatttcgatgttgctgttttgccattttccaacagcacaaataacgggttattgtttataaatactactattgccagcattgctgctaaagaagaaggggtatctctcgagaaaagagaggctgaagcaggtcctggaggttatggtcctggtcaacaaaggccaggacaacagggccctggaggtccaggagccgctgccgctgcagcaggtcgcggtcctggaggatatggtcctggacagcaaggccctggaggtcctggtgccgctgcggcagctgcagccggaaggggacctggtggatacggacctggacaacaaggacctggtcaacaaggtccaggcggttcaggtgctgcagcagctgcagctggccgaggacccggcggatatggaccaggtcagcagggaccaggaggacctggcgccgctgccgctgctgcaggacctggaggatacggaccaggacaacaaggtcctggtgctgctgctgccgccgctgcagcaggaagaggaccgggtggatatggaccgggacaacaaggtccaggaggaccaggagcggcagcggctgcagcagctggaagaggccctggcggttatggtcccggtcagcaaggacctggtcagcagggtccaggtggtccgggtgccgctgcagcagcagccggacctggtggttatggaccgggtcaacaaggtaccggagctgctgctgctgcggctgccggttcgggagctggtggatatggaccaggacagcaaggtcctggaggccctggagcagctgcagcagctgcaggtcctggaggttatggtcctggtcaacaaaggccaggacaacagggccctggaggtccaggagccgctgccgctgcagcaggtcgcggtcctggaggatatggtcctggacagcaaggccctggaggtcctggtgccgctgcggcagctgcagccggaaggggacctggtggatacggacctggacaacaaggacctggtcaacaaggtccaggcggttcaggtgctgcagcagctgcagctggccgaggacccggcggatatggaccaggtcagcagggaccaggaggacctggcgccgctgccgctgctgcaggacctggaggatacggaccaggacaacaaggtcctggtgctgctgctgccgccgctgcagcaggaagaggaccgggtggatatggaccgggacaacaaggtccaggaggaccaggagcggcagcggctgcagcagctggaagaggccctggcggttatggtcccggtcagcaaggacctggtcagcagggtccaggtggtccgggtgccgctgcagcagcagccggacctggtggttatggaccgggtcaacaaggtaccggagctgctgctgctgcggctgccggttcgggagctggtggatatggaccaggacagcaaggtcctggaggccctggagcagctgcagcagctgcaggtcctggaggttatggtcctggtcaacaaaggccaggacaacagggccctggaggtccaggagccgctgccgctgcagcaggtcgcggtcctggaggatatggtcctggacagcaaggccctggaggtcctggtgccgctgcggcagctgcagccggaaggggacctggtggatacggacctggacaacaaggacctggtcaacaaggtccaggcggttcaggtgctgcagcagctgcagctggccgaggacccggcggatatggaccaggtcagcagggaccaggaggacctggcgccgctgccgctgctgcaggacctggaggatacggaccaggacaacaaggtcctggtgctgctgctgccgccgctgcagcaggaagaggaccgggtggatatggaccgggacaacaaggtccaggaggaccaggagcggcagcggctgcagcagctggaagaggccctggcggttatggtcccggtcagcaaggacctggtcagcagggtccaggtggtccgggtgccgctgcagcagcagccggacctggtggttatggaccgggtcaacaaggtaccggagctgctgctgctgcggctgccggttcgggagctggtggatatggaccaggacagcaaggtcctggaggccctggagcagctgcagcagctgcaggtcctggaggttatggtcctggtcaacaaaggccaggacaacagggccctggaggtccaggagccgctgccgctgcagcaggtcgcggtcctggaggatatggtcctggacagcaaggccctggaggtcctggtgccgctgcggcagctgcagccggaaggggacctggtggatacggacctggacaacaaggacctggtcaacaaggtccaggcggttcaggtgctgcagcagctgcagctggccgaggacccggcggatatggaccaggtcagcagggaccaggaggacctggcgccgctgccgctgctgcaggacctggaggatacggaccaggacaacaaggtcctggtgctgctgctgccgccgctgcagcaggaagaggaccgggtggatatggaccgggacaacaaggtccaggaggaccaggagcggcagcggctgcagcagctggaagaggccctggcggttatggtcccggtcagcaaggacctggtcagcagggtccaggtggtccgggtgccgctgcagcagcagccggacctggtggttatggaccgggtcaacaaggtaccggagctgctgctgctgcggctgccggttcgggagctggtggatatggaccaggacagcaaggtcctggaggccctggagcagctgcagcagctgcaggtgactacaaagatgacgacgataaagattacaaagacgatgacgataaggactataaagatgatgacgacaaataataa

SEQ ID NO: 2773 - DNA, 2592 bp, synthetic construct
  misc_feature 1..2592: note = Description of Artificial Sequence: Synthetic polynucleotide
  source 1..2592: mol_type = other DNA
atgagatttccttcaatttttactgctgttttattcgcagcatcctccgcattagctgctccagtcaacactacaacagaagatgaaacggcacaaattccggctgaagctgtcatcggttactcagatttagaaggggatttcgatgttgctgttttgccattttccaacagcacaaataacgggttattgtttataaatactactattgccagcattgctgctaaagaagaaggggtatctctcgagaaaagagaggctgaagcaggttcaggaccgggaggttatggtccaggtcaacagggacccggtcgatctggtgctgcagcagcggctgcagctgcaggcagaggtcccggtggatatggtccaggccagcaaggacctggtggtcctggtgccgcagctgctgccgcaggaccaggtggttatggacctggccaacaaggtccaggtgctgccgccgctgcttcagccggtagaggaccgggtggttacggaccaggtcagcagggacctggaggttcaggtgcagctgcagcagctgctggacgtggccctggaggttatggaccaggacagcaaggcccaggcggaccaggagcagctgctgctgccgctgctggtactggaccaggaggatatggtccaggtcagcaaggtcctggaggctccggtgctgctgccgcagcggctggtaggggtccaggtggttacggacctggacaacaaggaccaggtggtcctggagctgcagcggctgcggctggcccaggaggatatggaccaggtcaacaaggacctggcgctgctgctgctgcggcagcaggttcaggaccgggaggttatggtccaggtcaacagggacccggtcgatctggtgctgcagcagcggctgcagctgcaggcagaggtcccggtggatatggtccaggccagcaaggacctggtggtcctggtgccgcagctgctgccgcaggaccaggtggttatggacctggccaacaaggtccaggtgctgccgccgctgcttcagccggtagaggaccgggtggttacggaccaggtcagcagggacctggaggttcaggtgcagctgcagcagctgctggacgtggccctggaggttatggaccaggacagcaaggcccaggcggaccaggagcagctgctgctgccgctgctggtactggaccaggaggatatggtccaggtcagcaaggtcctggaggctccggtgctgctgccgcagcggctggtaggggtccaggtggttacggacctggacaacaaggaccaggtggtcctggagctgcagcggctgcggctggcccaggaggatatggaccaggtcaacaaggacctggcgctgctgctgctgcggcagcaggttcaggaccgggaggttatggtccaggtcaacagggacccggtcgatctggtgctgcagcagcggctgcagctgcaggcagaggtcccggtggatatggtccaggccagcaaggacctggtggtcctggtgccgcagctgctgccgcaggaccaggtggttatggacctggccaacaaggtccaggtgctgccgccgctgcttcagccggtagaggaccgggtggttacggaccaggtcagcagggacctggaggttcaggtgcagctgcagcagctgctggacgtggccctggaggttatggaccaggacagcaaggcccaggcggaccaggagcagctgctgctgccgctgctggtactggaccaggaggatatggtccaggtcagcaaggtcctggaggctccggtgctgctgccgcagcggctggtaggggtccaggtggttacggacctggacaacaaggaccaggtggtcctggagctgcagcggctgcggctggcccaggaggatatggaccaggtcaacaaggacctggcgctgctgctgctgcggcagcaggttcaggaccgggaggttatggtccaggtcaacagggacccggtcgatctggtgctgcagcagcggctgcagctgcaggcagaggtcccggtggatatggtccaggccagcaaggacctggtggtcctggtgccgcagctgctgccgcaggaccaggtggttatggacctggccaacaaggtccaggtgctgccgccgctgcttcagccggtagaggaccgggtggttacggaccaggtcagcagggacctggaggttcaggtgcagctgcagcagctgctggacgtggccctggaggttatggaccaggacagcaaggcccaggcggaccaggagcagctgctgctgccgctgctggtactggaccaggaggatatggtccaggtcagcaaggtcctggaggctccggtgctgctgccgcagcggctggtaggggtccaggtggttacggacctggacaacaaggaccaggtggtcctggagctgcagcggctgcggctggcccaggaggatatggaccaggtcaacaaggacctggcgctgctgctgctgcggcagcaggtgactacaaagatgacgacgataaagattacaaagacgatgacgataaggactataaagatgatgacgacaaataataa

SEQ ID NO: 2774 - DNA, 2436 bp, synthetic construct
  misc_feature 1..2436: note = Description of Artificial Sequence: Synthetic polynucleotide
  source 1..2436: mol_type = other DNA
atgagatttccttcaatttttactgctgttttattcgcagcatcctccgcattagctgctccagtcaacactacaacagaagatgaaacggcacaaattccggctgaagctgtcatcggttactcagatttagaaggggatttcgatgttgctgttttgccattttccaacagcacaaataacgggttattgtttataaatactactattgccagcattgctgctaaagaagaaggggtatctctcgagaaaagagaggctgaagcaggtagcggaccaggaggttacggaccaggccaacagggaccaggtggaccgggcgctgcagccgccgccgctggaagaggaccaggtggttatggtcctggtcagcagggaccaggtggtccaggtgcggccgctgctgctgccgcaggacgaggacctggaggatacggtcctggccagcaaggacctggtggttccggtgctgccgctgccgctagtggtaggggtccaggtggtagtggtcctggtggatacggtcccggtcaacagggaccaggagcagccgctgctgctgctgctgcaggtagaggtcctggaggttacggacctggtcagcaaggacctggaggtccaggtgctgccgctgctgccgcagccggtagaggtccgggaggatatggtcctggacaacaaggtcctggtggttctggagccgccgctgctgccgctggaagaggtcctggtggctatggtcccggtcaacaaggacctggcggacctggtgctgcagctgccgcagcaggtagcggaccaggaggttacggaccaggccaacagggaccaggtggaccgggcgctgcagccgccgccgctggaagaggaccaggtggttatggtcctggtcagcagggaccaggtggtccaggtgcggccgctgctgctgccgcaggacgaggacctggaggatacggtcctggccagcaaggacctggtggttccggtgctgccgctgccgctagtggtaggggtccaggtggtagtggtcctggtggatacggtcccggtcaacagggaccaggagcagccgctgctgctgctgctgcaggtagaggtcctggaggttacggacctggtcagcaaggacctggaggtccaggtgctgccgctgctgccgcagccggtagaggtccgggaggatatggtcctggacaacaaggtcctggtggttctggagccgccgctgctgccgctggaagaggtcctggtggctatggtcccggtcaacaaggacctggcggacctggtgctgcagctgccgcagcaggtagcggaccaggaggttacggaccaggccaacagggaccaggtggaccgggcgctgcagccgccgccgctggaagaggaccaggtggttatggtcctggtcagcagggaccaggtggtccaggtgcggccgctgctgctgccgcaggacgaggacctggaggatacggtcctggccagcaaggacctggtggttccggtgctgccgctgccgctagtggtaggggtccaggtggtagtggtcctggtggatacggtcccggtcaacagggaccaggagcagccgctgctgctgctgctgcaggtagaggtcctggaggttacggacctggtcagcaaggacctggaggtccaggtgctgccgctgctgccgcagccggtagaggtccgggaggatatggtcctggacaacaaggtcctggtggttctggagccgccgctgctgccgctggaagaggtcctggtggctatggtcccggtcaacaaggacctggcggacctggtgctgcagctgccgcagcaggtagcggaccaggaggttacggaccaggccaacagggaccaggtggaccgggcgctgcagccgccgccgctggaagaggaccaggtggttatggtcctggtcagcagggaccaggtggtccaggtgcggccgctgctgctgccgcaggacgaggacctggaggatacggtcctggccagcaaggacctggtggttccggtgctgccgctgccgctagtggtaggggtccaggtggtagtggtcctggtggatacggtcccggtcaacagggaccaggagcagccgctgctgctgctgctgcaggtagaggtcctggaggttacggacctggtcagcaaggacctggaggtccaggtgctgccgctgctgccgcagccggtagaggtccgggaggatatggtcctggacaacaaggtcctggtggttctggagccgccgctgctgccgctggaagaggtcctggtggctatggtcccggtcaacaaggacctggcggacctggtgctgcagctgccgcagcaggtgactacaaagatgacgacgataaagattacaaagacgatgacgataaggactataaagatgatgacgacaaataataa

SEQ ID NO: 2775 - DNA, 2220 bp, synthetic construct
  misc_feature 1..2220: note = Description of Artificial Sequence: Synthetic polynucleotide
  source 1..2220: mol_type = other DNA
atgagatttccttcaatttttactgctgttttattcgcagcatcctccgcattagctgctccagtcaacactacaacagaagatgaaacggcacaaattccggctgaagctgtcatcggttactcagatttagaaggggatttcgatgttgctgttttgccattttccaacagcacaaataacgggttattgtttataaatactactattgccagcattgctgctaaagaagaaggggtatctctcgagaaaagagaggctgaagcaggtccaggaggttatggtcccggtcaacaaggtcctggagccgctgccgctgcagcaggtagaggacctggcggctatggacctggacaacagggcccaggcggttctggagctgccgcagctgccgcgggaagaggtccaggtggttatggtccaggacaacaaggacctggtggtcctggagctgccgctgcagctgcaggtcccggcggatacggaccaggacagcagggtaccggtgctgctgctgccgcggccgctggttctggtgccggtggttatggtcctggtcaacaaggaccaggaggtcctggagctgctgctgcagctgctggaccgggtggctatggaccaggccagcaaggccctggtgccgccgccgctgctgccgcaggtagtggcccaggcggttatggtccaggtcaacagggacctggtggacctggtgctgctgccgcagcagctgcaggtccaggaggttatggtcccggtcaacaaggtcctggagccgctgccgctgcagcaggtagaggacctggcggctatggacctggacaacagggcccaggcggttctggagctgccgcagctgccgcgggaagaggtccaggtggttatggtccaggacaacaaggacctggtggtcctggagctgccgctgcagctgcaggtcccggcggatacggaccaggacagcagggtaccggtgctgctgctgccgcggccgctggttctggtgccggtggttatggtcctggtcaacaaggaccaggaggtcctggagctgctgctgcagctgctggaccgggtggctatggaccaggccagcaaggccctggtgccgccgccgctgctgccgcaggtagtggcccaggcggttatggtccaggtcaacagggacctggtggacctggtgctgctgccgcagcagctgcaggtccaggaggttatggtcccggtcaacaaggtcctggagccgctgccgctgcagcaggtagaggacctggcggctatggacctggacaacagggcccaggcggttctggagctgccgcagctgccgcgggaagaggtccaggtggttatggtccaggacaacaaggacctggtggtcctggagctgccgctgcagctgcaggtcccggcggatacggaccaggacagcagggtaccggtgctgctgctgccgcggccgctggttctggtgccggtggttatggtcctggtcaacaaggaccaggaggtcctggagctgctgctgcagctgctggaccgggtggctatggaccaggccagcaaggccctggtgccgccgccgctgctgccgcaggtagtggcccaggcggttatggtccaggtcaacagggacctggtggacctggtgctgctgccgcagcagctgcaggtccaggaggttatggtcccggtcaacaaggtcctggagccgctgccgctgcagcaggtagaggacctggcggctatggacctggacaacagggcccaggcggttctggagctgccgcagctgccgcgggaagaggtccaggtggttatggtccaggacaacaaggacctggtggtcctggagctgccgctgcagctgcaggtcccggcggatacggaccaggacagcagggtaccggtgctgctgctgccgcggccgctggttctggtgccggtggttatggtcctggtcaacaaggaccaggaggtcctggagctgctgctgcagctgctggaccgggtggctatggaccaggccagcaaggccctggtgccgccgccgctgctgccgcaggtagtggcccaggcggttatggtccaggtcaacagggacctggtggacctggtgctgctgccgcagcagctgcaggtgactacaaagatgacgacgataaagattacaaagacgatgacgataaggactataaagatgatgacgacaaataataa

SEQ ID NO: 2776 - DNA, 2124 bp, synthetic construct
  misc_feature 1..2124: note = Description of Artificial Sequence: Synthetic polynucleotide
  source 1..2124: mol_type = other DNA
atgagatttccttcaatttttactgctgttttattcgcagcatcctccgcattagctgctccagtcaacactacaacagaagatgaaacggcacaaattccggctgaagctgtcatcggttactcagatttagaaggggatttcgatgttgctgttttgccattttccaacagcacaaataacgggttattgtttataaatactactattgccagcattgctgctaaagaagaaggggtatctctcgagaaaagagaggctgaagcaggtggctacggtcctggtagcggtcagcaaggcccaggcgctggtcaacaaggtcctggtgcaggacagcagggaccatatggaccatctgctgcagcagcagcggctgctgctggcggttacggccctggaggagctggtcagcagggaccaggtgccggtcaacaaggacctggatcacagggtcagtccggtcctggtgccactgtcgctgctgctgctgccggaggatatggcccaggtggtgccggacagcaaggtcctggagctggacaacaaggtcagggatctcaaggaccttatggaccagcggctaccgccgctgccgctgctgctggtggttacggaccaggaagtggccagcaaggtccaggagccggtcaacaaggtccaggaggacaaggaccatatggtccatctgccgctgcagctgctgctgccgcaggtggctacggtcctggtagcggtcagcaaggcccaggcgctggtcaacaaggtcctggtgcaggacagcagggaccatatggaccatctgctgcagcagcagcggctgctgctggcggttacggccctggaggagctggtcagcagggaccaggtgccggtcaacaaggacctggatcacagggtcagtccggtcctggtgccactgtcgctgctgctgctgccggaggatatggcccaggtggtgccggacagcaaggtcctggagctggacaacaaggtcagggatctcaaggaccttatggaccagcggctaccgccgctgccgctgctgctggtggttacggaccaggaagtggccagcaaggtccaggagccggtcaacaaggtccaggaggacaaggaccatatggtccatctgccgctgcagctgctgctgccgcaggtggctacggtcctggtagcggtcagcaaggcccaggcgctggtcaacaaggtcctggtgcaggacagcagggaccatatggaccatctgctgcagcagcagcggctgctgctggcggttacggccctggaggagctggtcagcagggaccaggtgccggtcaacaaggacctggatcacagggtcagtccggtcctggtgccactgtcgctgctgctgctgccggaggatatggcccaggtggtgccggacagcaaggtcctggagctggacaacaaggtcagggatctcaaggaccttatggaccagcggctaccgccgctgccgctgctgctggtggttacggaccaggaagtggccagcaaggtccaggagccggtcaacaaggtccaggaggacaaggaccatatggtccatctgccgctgcagctgctgctgccgcaggtggctacggtcctggtagcggtcagcaaggcccaggcgctggtcaacaaggtcctggtgcaggacagcagggaccatatggaccatctgctgcagcagcagcggctgctgctggcggttacggccctggaggagctggtcagcagggaccaggtgccggtcaacaaggacctggatcacagggtcagtccggtcctggtgccactgtcgctgctgctgctgccggaggatatggcccaggtggtgccggacagcaaggtcctggagctggacaacaaggtcagggatctcaaggaccttatggaccagcggctaccgccgctgccgctgctgctggtggttacggaccaggaagtggccagcaaggtccaggagccggtcaacaaggtccaggaggacaaggaccatatggtccatctgccgctgcagctgctgctgccgcaggtgactacaaagatgacgacgataaagattacaaagacgatgacgataaggactataaagatgatgacgacaaataataa

SEQ ID NO: 2777 - protein, 986 aa, synthetic construct
  REGION 1..986: note = Description of Artificial Sequence: Synthetic polypeptide
MRFPSIFTAVLFAASSALAAPVNTTTEDETAQIPAEAVIGYSDLEGDFDVAVLPFSNSTNNGLLFINTTIASIAAKEEGVSLEKREAEAGGYGPGAGQQGPGGAGQQGPGSQGPGGAGQQGPGGQGPYGPGAAAAAAAVGGYGPGAGQQGPGSQGPGSGGQQGPGGQGPYGPSAAAAAAAAGGYGPGAGQQGPGSQGPGSGGQQGPGGLGPYGPSAAAAAAAAGGYGPGAGQQGPGSQGPGSGGQQRPGGLGPYGPSAAAAAAAAGGYGPGAGQQGPGSQGPGSGGQQRPGGLGPYGPSAAAAAAAAGGYGPGAGQQGPGGAGQQGPGSQGPGGAGQQGPGGQGPYGPGAAAAAAAVGGYGPGAGQQGPGSQGPGSGGQQGPGGQGPYGPSAAAAAAAAGGYGPGAGQQGPGSQGPGSGGQQGPGGLGPYGPSAAAAAAAAGGYGPGAGQQGPGSQGPGSGGQQRPGGLGPYGPSAAAAAAAAGGYGPGAGQQGPGSQGPGSGGQQRPGGLGPYGPSAAAAAAAAGGYGPGAGQQGPGGAGQQGPGSQGPGGAGQQGPGGQGPYGPGAAAAAAAVGGYGPGAGQQGPGSQGPGSGGQQGPGGQGPYGPSAAAAAAAAGGYGPGAGQQGPGSQGPGSGGQQGPGGLGPYGPSAAAAAAAAGGYGPGAGQQGPGSQGPGSGGQQRPGGLGPYGPSAAAAAAAAGGYGPGAGQQGPGSQGPGSGGQQRPGGLGPYGPSAAAAAAAAGGYGPGAGQQGPGGAGQQGPGSQGPGGAGQQGPGGQGPYGPGAAAAAAAVGGYGPGAGQQGPGSQGPGSGGQQGPGGQGPYGPSAAAAAAAAGGYGPGAGQQGPGSQGPGSGGQQGPGGLGPYGPSAAAAAAAAGGYGPGAGQQGPGSQGPGSGGQQRPGGLGPYGPSAAAAAAAAGGYGPGAGQQGPGSQGPGSGGQQRPGGLGPYGPSAAAAAAAAGDYKDDDDKDYKDDDDKDYKDDDDK

SEQ ID NO: 2778 - protein, 1226 aa, synthetic construct
  REGION 1..1226: note = Description of Artificial Sequence: Synthetic polypeptide
MRFPSIFTAVLFAASSALAAPVNTTTEDETAQIPAEAVIGYSDLEGDFDVAVLPFSNSTNNGLLFINTTIASIAAKEEGVSLEKREAEAGSAPQGAGGPAPQGPSQQGPVSQGPYGPGAAAAAAAAGGYGPGAGQQGPGSQGPGSGGQQGPGSQGPGSGGQQGPGGQGPYGPSAAAAAAAAAGGYGPGAGQQGPGSQGPGSGGQQGPGGQGPYGPGAAAAAAAVGGYGPGAGQQGPGSQGPGSGGQQGPGGQGPYGPSAAAAAAAAGGYGPGAGQQGPGSQGPGSGGQQGPGGQGPYGPSAAAAAAAAGGYGPGAGQQGPGSGGQQGPGGQGPYGSGQQGPGGAGQQGPGGQGPYGPGAAAAAAAAAGSAPQGAGGPAPQGPSQQGPVSQGPYGPGAAAAAAAAGGYGPGAGQQGPGSQGPGSGGQQGPGSQGPGSGGQQGPGGQGPYGPSAAAAAAAAAGGYGPGAGQQGPGSQGPGSGGQQGPGGQGPYGPGAAAAAAAVGGYGPGAGQQGPGSQGPGSGGQQGPGGQGPYGPSAAAAAAAAGGYGPGAGQQGPGSQGPGSGGQQGPGGQGPYGPSAAAAAAAAGGYGPGAGQQGPGSGGQQGPGGQGPYGSGQQGPGGAGQQGPGGQGPYGPGAAAAAAAAAGSAPQGAGGPAPQGPSQQGPVSQGPYGPGAAAAAAAAGGYGPGAGQQGPGSQGPGSGGQQGPGSQGPGSGGQQGPGGQGPYGPSAAAAAAAAAGGYGPGAGQQGPGSQGPGSGGQQGPGGQGPYGPGAAAAAAAVGGYGPGAGQQGPGSQGPGSGGQQGPGGQGPYGPSAAAAAAAAGGYGPGAGQQGPGSQGPGSGGQQGPGGQGPYGPSAAAAAAAAGGYGPGAGQQGPGSGGQQGPGGQGPYGSGQQGPGGAGQQGPGGQGPYGPGAAAAAAAAAGSAPQGAGGPAPQGPSQQGPVSQGPYGPGAAAAAAAAGGYGPGAGQQGPGSQGPGSGGQQGPGSQGPGSGGQQGPGGQGPYGPSAAAAAAAAAGGYGPGAGQQGPGSQGPGSGGQQGPGGQGPYGPGAAAAAAAVGGYGPGAGQQGPGSQGPGSGGQQGPGGQGPYGPSAAAAAAAAGGYGPGAGQQGPGSQGPGSGGQQGPGGQGPYGPSAAAAAAAAGGYGPGAGQQGPGSGGQQGPGGQGPYGSGQQGPGGAGQQGPGGQGPYGPGAAAAAAAAAGDYKDDDDKDYKDDDDKDYKDDDDK

SEQ ID NO: 2779 - protein, 1118 aa, synthetic construct; identical to SEQ ID NO: 1435
  REGION 1..1118: note = Description of Artificial Sequence: Synthetic polypeptide

SEQ ID NO: 2780 - protein, 1026 aa, synthetic construct
  REGION 1..1026: note = Description of Artificial Sequence: Synthetic polypeptide
MRFPSIFTAVLFAASSALAAPVNTTTEDETAQIPAEAVIGYSDLEGDFDVAVLPFSNSTNNGLLFINTTIASIAAKEEGVSLEKREAEAGGYGPGAGQQGPGSGGQQGPGGQGPYGSGQQGPGGAGQQGPGGQGPYGPGAAAAAAAAAGGYGPGAGQQGPGGAGQQGPGSQGPGGQGPYGPGAGQQGPGSQGPGSGGQQGPGGQGPYGPSAAAAAAAAAGGYGPGAGQRSQGPGGQGPYGPGAGQQGPGSQGPGSGGQQGPGGQGPYGPSAAAAAAAAGPGAGRQGPGSQGPGSGGQQGPGGQGPYGPSAAAAAAAAGGYGPGAGQQGPGSGGQQGPGGQGPYGSGQQGPGGAGQQGPGGQGPYGPGAAAAAAAAAGGYGPGAGQQGPGGAGQQGPGSQGPGGQGPYGPGAGQQGPGSQGPGSGGQQGPGGQGPYGPSAAAAAAAAAGGYGPGAGQRSQGPGGQGPYGPGAGQQGPGSQGPGSGGQQGPGGQGPYGPSAAAAAAAAGPGAGRQGPGSQGPGSGGQQGPGGQGPYGPSAAAAAAAAGGYGPGAGQQGPGSGGQQGPGGQGPYGSGQQGPGGAGQQGPGGQGPYGPGAAAAAAAAAGGYGPGAGQQGPGGAGQQGPGSQGPGGQGPYGPGAGQQGPGSQGPGSGGQQGPGGQGPYGPSAAAAAAAAAGGYGPGAGQRSQGPGGQGPYGPGAGQQGPGSQGPGSGGQQGPGGQGPYGPSAAAAAAAAGPGAGRQGPGSQGPGSGGQQGPGGQGPYGPSAAAAAAAAGGYGPGAGQQGPGSGGQQGPGGQGPYGSGQQGPGGAGQQGPGGQGPYGPGAAAAAAAAAGGYGPGAGQQGPGGAGQQGPGSQGPGGQGPYGPGAGQQGPGSQGPGSGGQQGPGGQGPYGPSAAAAAAAAAGGYGPGAGQRSQGPGGQGPYGPGAGQQGPGSQGPGSGGQQGPGGQGPYGPSAAAAAAAAGPGAGRQGPGSQGPGSGGQQGPGGQGPYGPSAAAAAAAAGDYKDDDDKDYKDDDDKDYKDDDDK

SEQ ID NO: 2781 - protein, 1142 aa, synthetic construct
  REGION 1..1142: note = Description of Artificial Sequence: Synthetic polypeptide
MRFPSIFTAVLFAASSALAAPVNTTTEDETAQIPAEAVIGYSDLEGDFDVAVLPFSNSTNNGLLFINTTIASIAAKEEGVSLEKREAEAGPGARRQGPGSQGPGSGGQQGPGGQGPYGSGQQGPGGAGQQGPGGQGPYGPGAAAAAAAAAGGYGPGAGQQGPGGAGQQGPGSQGPGGQGPYGPGAGQQGPGSQGPGSGGQQGPGGQGPYGPSAAAAAAAAGGYGPGAGQQGPGSQGPGSGGQQGPGGQGPYGPGAAAAAAAVGGYGPGAGQQGPGSQGPGSGGQQGPGGQGPYGPSAAAAAAAAGGYGPGAGQQGPGSQGPGSGGQQGPGGQGPYGPSAAAAAAAAGPGARRQGPGSQGPGSGGQQGPGGQGPYGSGQQGPGGAGQQGPGGQGPYGPGAAAAAAAAAGGYGPGAGQQGPGGAGQQGPGSQGPGGQGPYGPGAGQQGPGSQGPGSGGQQGPGGQGPYGPSAAAAAAAAGGYGPGAGQQGPGSQGPGSGGQQGPGGQGPYGPGAAAAAAAVGGYGPGAGQQGPGSQGPGSGGQQGPGGQGPYGPSAAAAAAAAGGYGPGAGQQGPGSQGPGSGGQQGPGGQGPYGPSAAAAAAAAGPGARRQGPGSQGPGSGGQQGPGGQGPYGSGQQGPGGAGQQGPGGQGPYGPGAAAAAAAAAGGYGPGAGQQGPGGAGQQGPGSQGPGGQGPYGPGAGQQGPGSQGPGSGGQQGPGGQGPYGPSAAAAAAAAGGYGPGAGQQGPGSQGPGSGGQQGPGGQGPYGPGAAAAAAAVGGYGPGAGQQGPGSQGPGSGGQQGPGGQGPYGPSAAAAAAAAGGYGPGAGQQGPGSQGPGSGGQQGPGGQGPYGPSAAAAAAAAGPGARRQGPGSQGPGSGGQQGPGGQGPYGSGQQGPGGAGQQGPGGQGPYGPGAAAAAAAAAGGYGPGAGQQGPGGAGQQGPGSQGPGGQGPYGPGAGQQGPGSQGPGSGGQQGPGGQGPYGPSAAAAAAAAGGYGPGAGQQGPGSQGPGSGGQQGPGGQGPYGPGAAAAAAAVGGYGPGAGQQGPGSQGPGSGGQQGPGGQGPYGPSAAAAAAAAGGYGPGAGQQGPGSQGPGSGGQQGPGGQGPYGPSAAAAAAAAGDYKDDDDKDYKDDDDKDYKDDDDK

SEQ ID NO: 2782 - protein, 1134 aa, synthetic construct
  REGION 1..1134: note = Description of Artificial Sequence: Synthetic polypeptide
MRFPSIFTAVLFAASSALAAPVNTTTEDETAQIPAEAVIGYSDLEGDFDVAVLPFSNSTNNGLLFINTTIASIAAKEEGVSLEKREAEAGGYGPGAGQQGPGSGGQQGPGGQGPYGSGQQGPGGAGQQGPGGQGPYGPGAAAAAAAAAGGYGPGAGQQGPGGAGQQGPEGPGSQGPGSGGQQGPGGQGPYGPGAAAAAAAVGGYGPGAGQQGPGSQGPGSGGQQGPGGQGPYGPSAAAAAAAAGGYGPGAGQQGPGSQGPGSGGQQGPGGQGPYGPSAAAAAAAAGGYGPGAGQQGPGSGGQQGPGGQGPYGSGQQGPGGAGQQGPGGQGPYGPGAAAAAAAAAGGYGPGAGQQGPGSGGQQGPGGQGPYGSGQQGPGGAGQQGPGGQGPYGPGAAAAAAAAAGGYGPGAGQQGPGGAGQQGPEGPGSQGPGSGGQQGPGGQGPYGPGAAAAAAAVGGYGPGAGQQGPGSQGPGSGGQQGPGGQGPYGPSAAAAAAAAGGYGPGAGQQGPGSQGPGSGGQQGPGGQGPYGPSAAAAAAAAGGYGPGAGQQGPGSGGQQGPGGQGPYGSGQQGPGGAGQQGPGGQGPYGPGAAAAAAAAAGGYGPGAGQQGPGSGGQQGPGGQGPYGSGQQGPGGAGQQGPGGQGPYGPGAAAAAAAAAGGYGPGAGQQGPGGAGQQGPEGPGSQGPGSGGQQGPGGQGPYGPGAAAAAAAVGGYGPGAGQQGPGSQGPGSGGQQGPGGQGPYGPSAAAAAAAAGGYGPGAGQQGPGSQGPGSGGQQGPGGQGPYGPSAAAAAAAAGGYGPGAGQQGPGSGGQQGPGGQGPYGSGQQGPGGAGQQGPGGQGPYGPGAAAAAAAAAGGYGPGAGQQGPGSGGQQGPGGQGPYGSGQQGPGGAGQQGPGGQGPYGPGAAAAAAAAAGGYGPGAGQQGPGGAGQQGPEGPGSQGPGSGGQQGPGGQGPYGPGAAAAAAAVGGYGPGAGQQGPGSQGPGSGGQQGPGGQGPYGPSAAAAAAAAGGYGPGAGQQGPGSQGPGSGGQQGPGGQGPYGPSAAAAAAAAGGYGPGAGQQGPGSGGQQGPGGQGPYGSGQQGPGGAGQQGPGGQGPYGPGAAAAAAAAAGDYKDDDDKDYKDDDDKDYKDDDDK

SEQ ID NO: 2783 - protein, 1122 aa, synthetic construct
  REGION 1..1122: note = Description of Artificial Sequence: Synthetic polypeptide
MRFPSIFTAVLFAASSALAAPVNTTTEDETAQIPAEAVIGYSDLEGDFDVAVLPFSNSTNNGLLFINTTIASIAAKEEGVSLEKREAEAGGYGPGAGQQGPGGAGQQGPGSQGPGGQGPYGPGAGQQGPGSQGPGSGGQQGPGGQGPYGPSAAAAAAAAGGYGPGAGQQGPGSQGPGSGGQQGPGSQGPGSGGQQGPGGQGPYGPSAAAAAAAAAGGYGPGAGQQGPGSQGPGSGGQQGPGGQGPYGPGAAAAAAAVGGYGPGAGQQGPGSQGPGSGGQQGPGGQGPYGPSAAAAAAAAGGYGPGAGQQGPGSQGPGSGGQQGPGGQGPYGPSAAAAAAAAGGYGPGAGQQGPGGAGQQGPGSQGPGGQGPYGPGAGQQGPGSQGPGSGGQQGPGGQGPYGPSAAAAAAAAGGYGPGAGQQGPGSQGPGSGGQQGPGSQGPGSGGQQGPGGQGPYGPSAAAAAAAAAGGYGPGAGQQGPGSQGPGSGGQQGPGGQGPYGPGAAAAAAAVGGYGPGAGQQGPGSQGPGSGGQQGPGGQGPYGPSAAAAAAAAGGYGPGAGQQGPGSQGPGSGGQQGPGGQGPYGPSAAAAAAAAGGYGPGAGQQGPGGAGQQGPGSQGPGGQGPYGPGAGQQGPGSQGPGSGGQQGPGGQGPYGPSAAAAAAAAGGYGPGAGQQGPGSQGPGSGGQQGPGSQGPGSGGQQGPGGQGPYGPSAAAAAAAAAGGYGPGAGQQGPGSQGPGSGGQQGPGGQGPYGPGAAAAAAAVGGYGPGAGQQGPGSQGPGSGGQQGPGGQGPYGPSAAAAAAAAGGYGPGAGQQGPGSQGPGSGGQQGPGGQGPYGPSAAAAAAAAGGYGPGAGQQGPGGAGQQGPGSQGPGGQGPYGPGAGQQGPGSQGPGSGGQQGPGGQGPYGPSAAAAAAAAGGYGPGAGQQGPGSQGPGSGGQQGPGSQGPGSGGQQGPGGQGPYGPSAAAAAAAAAGGYGPGAGQQGPGSQGPGSGGQQGPGGQGPYGPGAAAAAAAVGGYGPGAGQQGPGSQGPGSGGQQGPGGQGPYGPSAAAAAAAAGGYGPGAGQQGPGSQGPGSGGQQGPGGQGPYGPSAAAAAAAAGDYKDDDDKDYKDDDDKDYKDDDDK

SEQ ID NO: 2784 - protein, 1158 aa, synthetic construct
  REGION 1..1158: note = Description of Artificial Sequence: Synthetic polypeptide
MRFPSIFTAVLFAASSALAAPVNTTTEDETAQIPAEAVIGYSDLEGDFDVAVLPFSNSTNNGLLFINTTIASIAAKEEGVSLEKREAEAGGYGPGAGQQGPGSGGQQGPGGQGPYGSGQQGPGGAGQQGPGGQGPYGPGAAAAAAAAAGGYGPGAGQQGPGGAGQQGPGSQGPGGQGPYGPGAGQQGPGSQGPGSGGQQGPGGQGPYGPSAAAAAAAAGGYGPGAGQQGPGSQGPGSGGQQGPGGQGPYGPSAAAAAAAAGGYGPGAGQQGPGSGGQQGPGGQGPYGSGQQGPGGAGQQGPGGQGPYGGGYGPGAGQQGPGSQGPGSGGQQGPGGQGPYGPSAAAAAAAAGGYGPGAGQQGPGSGGQQGPGGQGPYGSGQQGPGGAGQQGPGGQGPYGPGAAAAAAAAAGGYGPGAGQQGPGGAGQQGPGSQGPGGQGPYGPGAGQQGPGSQGPGSGGQQGPGGQGPYGPSAAAAAAAAGGYGPGAGQQGPGSQGPGSGGQQGPGGQGPYGPSAAAAAAAAGGYGPGAGQQGPGSGGQQGPGGQGPYGSGQQGPGGAGQQGPGGQGPYGGGYGPGAGQQGPGSQGPGSGGQQGPGGQGPYGPSAAAAAAAAGGYGPGAGQQGPGSGGQQGPGGQGPYGSGQQGPGGAGQQGPGGQGPYGPGAAAAAAAAAGGYGPGAGQQGPGGAGQQGPGSQGPGGQGPYGPGAGQQGPGSQGPGSGGQQGPGGQGPYGPSAAAAAAAAGGYGPGAGQQGPGSQGPGSGGQQGPGGQGPYGPSAAAAAAAAGGYGPGAGQQGPGSGGQQGPGGQGPYGSGQQGPGGAGQQGPGGQGPYGGGYGPGAGQQGPGSQGPGSGGQQGPGGQGPYGPSAAAAAAAAGGYGPGAGQQGPGSGGQQGPGGQGPYGSGQQGPGGAGQQGPGGQGPYGPGAAAAAAAAAGGYGPGAGQQGPGGAGQQGPGSQGPGGQGPYGPGAGQQGPGSQGPGSGGQQGPGGQGPYGPSAAAAAAAAGGYGPGAGQQGPGSQGPGSGGQQGPGGQGPYGPSAAAAAAAAGGYGPGAGQQGPGSGGQQGPGGQGPYGSGQQGPGGAGQQGPGGQGPYGGGYGPGAGQQGPGSQGPGSGGQQGPGGQGPYGPSAAAAAAAAGDYKDDDDKDYKDDDDKDYKDDDDK

SEQ ID NO: 2785 - protein, 1146 aa, synthetic construct
  REGION 1..1146: note = Description of Artificial Sequence: Synthetic polypeptide
MRFPSIFTAVLFAASSALAAPVNTTTEDETAQIPAEAVIGYSDLEGDFDVAVLPFSNSTNNGLLFINTTIASIAAKEEGVSLEKREAEAGPGARRQGPGSQGPGSGGQQGPGGQGPYGSGQQGPGGAGQQGPGGQGPYGPGAAAAAAAAAGGYGPGAGQQGPGGAGQQGPGSQGPGGQGPYGPGAGQQGPGSQGPGSGGQQGPGGQGPYGPSAAAAAAAAAGGYGPGAGQQGPGSQGPGSGGQQGPGGQGPYGPGAAAAAAAVGGYGPGAGQQGPGSQGPGSGGQQGPGGQGPYGPSAAAAAAAAGGYGPGAGQQGPGSQGPGSGGQQGPGGQGPYGPSAAAAAAAAGPGARRQGPGSQGPGSGGQQGPGGQGPYGSGQQGPGGAGQQGPGGQGPYGPGAAAAAAAAAGGYGPGAGQQGPGGAGQQGPGSQGPGGQGPYGPGAGQQGPGSQGPGSGGQQGPGGQGPYGPSAAAAAAAAAGGYGPGAGQQGPGSQGPGSGGQQGPGGQGPYGPGAAAAAAAVGGYGPGAGQQGPGSQGPGSGGQQGPGGQGPYGPSAAAAAAAAGGYGPGAGQQGPGSQGPGSGGQQGPGGQGPYGPSAAAAAAAAGPGARRQGPGSQGPGSGGQQGPGGQGPYGSGQQGPGGAGQQGPGGQGPYGPGAAAAAAAAAGGYGPGAGQQGPGGAGQQGPGSQGPGGQGPYGPGAGQQGPGSQGPGSGGQQGPGGQGPYGPSAAAAAAAAAGGYGPGAGQQGPGSQGPGSGGQQGPGGQGPYGPGAAAAAAAVGGYGPGAGQQGPGSQGPGSGGQQGPGGQGPYGPSAAAAAAAAGGYGPGAGQQGPGSQGPGSGGQQGPGGQGPYGPSAAAAAAAAGPGARRQGPGSQGPGSGGQQGPGGQGPYGSGQQGPGGAGQQGPGGQGPYGPGAAAAAAAAAGGYGPGAGQQGPGGAGQQGPGSQGPGGQGPYGPGAGQQGPGSQGPGSGGQQGPGGQGPYGPSAAAAAAAAAGGYGPGAGQQGPGSQGPGSGGQQGPGGQGPYGPGAAAAAAAVGGYGPGAGQQGPGSQGPGSGGQQGPGGQGPYGPSAAAAAAAAGGYGPGAGQQGPGSQGPGSGGQQGPGGQGPYGPSAAAAAAAAGDYKDDDDKDYKDDDDKDYKDDDDK

SEQ ID NO: 2786 - protein, 674 aa, synthetic construct
  REGION 1..674: note = Description of Artificial Sequence: Synthetic polypeptide
MRFPSIFTAVLFAASSALAAPVNTTTEDETAQIPAEAVIGYSDLEGDFDVAVLPFSNSTNNGLLFINTTIASIAAKEEGVSLEKREAEAGPGYGPGAGQQGPGSGGQQGGPGSGQQGPGGAGQGGPRGQGPYGPGAAAAAAAAAGGYGPGAGQQGPGSQGPGSGGQQGPGSQGPYGPSAAAAAAAAGPGYGPGAGQQGPGSQGPGSGGQQGPGGQGPYGPSAAAAAAAAGPGYGPGAGQQGPGSGGQQGGPGSGQQGPGGAGQGGPRGQGPYGPGAAAAAAAAAGGYGPGAGQQGPGSQGPGSGGQQGPGSQGPYGPSAAAAAAAAGPGYGPGAGQQGPGSQGPGSGGQQGPGGQGPYGPSAAAAAAAAGPGYGPGAGQQGPGSGGQQGGPGSGQQGPGGAGQGGPRGQGPYGPGAAAAAAAAAGGYGPGAGQQGPGSQGPGSGGQQGPGSQGPYGPSAAAAAAAAGPGYGPGAGQQGPGSQGPGSGGQQGPGGQGPYGPSAAAAAAAAGPGYGPGAGQQGPGSGGQQGGPGSGQQGPGGAGQGGPRGQGPYGPGAAAAAAAAAGGYGPGAGQQGPGSQGPGSGGQQGPGSQGPYGPSAAAAAAAAGPGYGPGAGQQGPGSQGPGSGGQQGPGGQGPYGPSAAAAAAAAGDYKDDDDKDYKDDDDKDYKDDDDK

SEQ ID NO: 2787 - protein, 674 aa, synthetic construct
  REGION 1..674: note = Description of Artificial Sequence: Synthetic polypeptide
MRFPSIFTAVLFAASSALAAPVNTTTEDETAQIPAEAVIGYSDLEGDFDVAVLPFSNSTNNGLLFINTTIASIAAKEEGVSLEKREAEAGPGYGPGAGQQGPGSGGQQGGQGSGQQGPGGAGQGGPRGQGPYGPGAAAAAAAAAGGYGPGAGQQGPGSQGPGSGGQQGPGSQGPYGPSAAAAAAAAGPGYGPGAGQQGPGSQGPGSGGQQGPGGQGPYGPSAAAAAAAAGPGYGPGAGQQGPGSGGQQGGQGSGQQGPGGAGQGGPRGQGPYGPGAAAAAAAAAGGYGPGAGQQGPGSQGPGSGGQQGPGSQGPYGPSAAAAAAAAGPGYGPGAGQQGPGSQGPGSGGQQGPGGQGPYGPSAAAAAAAAGPGYGPGAGQQGPGSGGQQGGQGSGQQGPGGAGQGGPRGQGPYGPGAAAAAAAAAGGYGPGAGQQGPGSQGPGSGGQQGPGSQGPYGPSAAAAAAAAGPGYGPGAGQQGPGSQGPGSGGQQGPGGQGPYGPSAAAAAAAAGPGYGPGAGQQGPGSGGQQGGQGSGQQGPGGAGQGGPRGQGPYGPGAAAAAAAAAGGYGPGAGQQGPGSQGPGSGGQQGPGSQGPYGPSAAAAAAAAGPGYGPGAGQQGPGSQGPGSGGQQGPGGQGPYGPSAAAAAAAAGDYKDDDDKDYKDDDDKDYKDDDDK

SEQ ID NO: 2788 - protein, 670 aa, synthetic construct
  REGION 1..670: note = Description of Artificial Sequence: Synthetic polypeptide
MRFPSIFTAVLFAASSALAAPVNTTTEDETAQIPAEAVIGYSDLEGDFDVAVLPFSNSTNNGLLFINTTIASIAAKEEGVSLEKREAEAGPGYGPGAGQQGPGSGGQQGGQGSGQQGPGGAGQGGPRGQGPYGPGAAAAAAAAGGYGPGAGQQGPGSQGPGSGGQQGPGSQGPYGPSAAAAAAAAGPGYGPGAGQQGPGSQGPGSGGQQGPGSQGPYGPSAAAAAAAAGPGYGPGAGQQGPGSGGQQGGQGSGQQGPGGAGQGGPRGQGPYGPGAAAAAAAAGGYGPGAGQQGPGSQGPGSGGQQGPGSQGPYGPSAAAAAAAAGPGYGPGAGQQGPGSQGPGSGGQQGPGSQGPYGPSAAAAAAAAGPGYGPGAGQQGPGSGGQQGGQGSGQQGPGGAGQGGPRGQGPYGPGAAAAAAAAGGYGPGAGQQGPGSQGPGSGGQQGPGSQGPYGPSAAAAAAAAGPGYGPGAGQQGPGSQGPGSGGQQGPGSQGPYGPSAAAAAAAAGPGYGPGAGQQGPGSGGQQGGQGSGQQGPGGAGQGGPRGQGPYGPGAAAAAAAAGGYGPGAGQQGPGSQGPGSGGQQGPGSQGPYGPSAAAAAAAAGPGYGPGAGQQGPGSQGPGSGGQQGPGSQGPYGPSAAAAAAAAGDYKDDDDKDYKDDDDKDYKDDDDK

SEQ ID NO: 2789 - protein, 1058 aa, synthetic construct
  REGION 1..1058: note = Description of Artificial Sequence: Synthetic polypeptide
MRFPSIFTAVLFAASSALAAPVNTTTEDETAQIPAEAVIGYSDLEGDFDVAVLPFSNSTNNGLLFINTTIASIAAKEEGVSLEKREAEAGPGGYGGPGQQGPGQGQQQGPASAAAAAAAAGPGGYGGPGQQGPGQGQQQGPASAAAAAAAAAGPGGYGGPGQQRPGQAQYGRGTGQQGQGPGAQQGPASAAAAAAAGAGLYGGPGQQGPGQGQQQGPASAAAAAAAAAAAGPGGYGGPGQQGPGQAQQQGPASAAAAAAAGPGGYSGPGQQGPGQAQQQGPASAAAAAAAAAGPGGYGGPGQQGPGQGQQQGPASAAAAAAATAAGPGGYGGPGQQGPGQGQQQGPASAAAAAAAAGPGGYGGPGQQGPGQGQQQGPASAAAAAAAAAGPGGYGGPGQQRPGQAQYGRGTGQQGQGPGAQQGPASAAAAAAAGAGLYGGPGQQGPGQGQQQGPASAAAAAAAAAAAGPGGYGGPGQQGPGQAQQQGPASAAAAAAAGPGGYSGPGQQGPGQAQQQGPASAAAAAAAAAGPGGYGGPGQQGPGQGQQQGPASAAAAAAATAAGPGGYGGPGQQGPGQGQQQGPASAAAAAAAAGPGGYGGPGQQGPGQGQQQGPASAAAAAAAAAGPGGYGGPGQQRPGQAQYGRGTGQQGQGPGAQQGPASAAAAAAAGAGLYGGPGQQGPGQGQQQGPASAAAAAAAAAAAGPGGYGGPGQQGPGQAQQQGPASAAAAAAAGPGGYSGPGQQGPGQAQQQGPASAAAAAAAAAGPGGYGGPGQQGPGQGQQQGPASAAAAAAATAAGPGGYGGPGQQGPGQGQQQGPASAAAAAAAAGPGGYGGPGQQGPGQGQQQGPASAAAAAAAAAGPGGYGGPGQQRPGQAQYGRGTGQQGQGPGAQQGPASAAAAAAAGAGLYGGPGQQGPGQGQQQGPASAAAAAAAAAAAGPGGYGGPGQQGPGQAQQQGPASAAAAAAAGPGGYSGPGQQGPGQAQQQGPASAAAAAAAAAGPGGYGGPGQQGPGQGQQQGPASAAAAAAATAAGDYKDDDDKDYKDDDDKDYKDDDDK

SEQ ID NO: 2790 - protein, 1026 aa, synthetic construct
  REGION 1..1026: note = Description of Artificial Sequence: Synthetic polypeptide
MRFPSIFTAVLFAASSALAAPVNTTTEDETAQIPAEAVIGYSDLEGDFDVAVLPFSNSTNNGLLFINTTIASIAAKEEGVSLEKREAEAGPGGYGGPGQQGPGQGQYGPGTGQQGQGPSGQQGPAGAAAAAAAAAGPGGYGGPGQQGPGQGQYGPGAGQQGQGPGGQQGPAGAAAAAAAAAGPGGYGGPGQQGPGQGQQQGRAGAAAAAAAGPGGYGGPGQQGPGQAQQQGPAAAASAGPGGYGGPGQQGPGQGQQKGPASAAAAAAATAAGPGGYGGPGQQGPGQGQYGPGTGQQGQGPGGQQGPASAAAAAAAAAGPGGYGGPGQQGPGQGQYGPGTGQQGQGPSGQQGPAGAAAAAAAAAGPGGYGGPGQQGPGQGQYGPGAGQQGQGPGGQQGPAGAAAAAAAAAGPGGYGGPGQQGPGQGQQQGRAGAAAAAAAGPGGYGGPGQQGPGQAQQQGPAAAASAGPGGYGGPGQQGPGQGQQKGPASAAAAAAATAAGPGGYGGPGQQGPGQGQYGPGTGQQGQGPGGQQGPASAAAAAAAAAGPGGYGGPGQQGPGQGQYGPGTGQQGQGPSGQQGPAGAAAAAAAAAGPGGYGGPGQQGPGQGQYGPGAGQQGQGPGGQQGPAGAAAAAAAAAGPGGYGGPGQQGPGQGQQQGRAGAAAAAAAGPGGYGGPGQQGPGQAQQQGPAAAASAGPGGYGGPGQQGPGQGQQKGPASAAAAAAATAAGPGGYGGPGQQGPGQGQYGPGTGQQGQGPGGQQGPASAAAAAAAAAGPGGYGGPGQQGPGQGQYGPGTGQQGQGPSGQQGPAGAAAAAAAAAGPGGYGGPGQQGPGQGQYGPGAGQQGQGPGGQQGPAGAAAAAAAAAGPGGYGGPGQQGPGQGQQQGRAGAAAAAAAGPGGYGGPGQQGPGQAQQQGPAAAASAGPGGYGGPGQQGPGQGQQKGPASAAAAAAATAAGPGGYGGPGQQGPGQGQYGPGTGQQGQGPGGQQGPASAAAAAAAAAGDYKDDDDKDYKDDDDKDYKDDDDK

SEQ ID NO: 2791 - protein, 1090 aa, synthetic construct; identical to SEQ ID NO: 1439
  REGION 1..1090: note = Description of Artificial Sequence: Synthetic polypeptide

SEQ ID NO: 2792 - protein, 1030 aa, synthetic construct
  REGION 1..1030: note = Description of Artificial Sequence: Synthetic polypeptide
MRFPSIFTAVLFAASSALAAPVNTTTEDETAQIPAEAVIGYSDLEGDFDVAVLPFSNSTNNGLLFINTTIASIAAKEEGVSLEKREAEAGPGGYGGPGQQGPGQGQYGPGTGQQGQGPGGQQGPVGAAAAAAAAVSSGGYGSQGAGQGGQQGSGQRGPAAAGPGGYSGPGQQGPGQGGQQGPASAAAAAAAAAGPGGYGGSGQQGPGQGRGTGQQGQGPGGQQGPASAAAAAAAGPGGYGGPGQQGPGQGQYGPGTGQQGQGPASAAAAAAAGPGGYGGPGQQGPGQGQYGPGTGQQGQGPGGQQGPGGASAAAAAAAGPGGYGGPGQQGPGQGQYGPGTGQQGQGPGGQQGPVGAAAAAAAAVSSGGYGSQGAGQGGQQGSGQRGPAAAGPGGYSGPGQQGPGQGGQQGPASAAAAAAAAAGPGGYGGSGQQGPGQGRGTGQQGQGPGGQQGPASAAAAAAAGPGGYGGPGQQGPGQGQYGPGTGQQGQGPASAAAAAAAGPGGYGGPGQQGPGQGQYGPGTGQQGQGPGGQQGPGGASAAAAAAAGPGGYGGPGQQGPGQGQYGPGTGQQGQGPGGQQGPVGAAAAAAAAVSSGGYGSQGAGQGGQQGSGQRGPAAAGPGGYSGPGQQGPGQGGQQGPASAAAAAAAAAGPGGYGGSGQQGPGQGRGTGQQGQGPGGQQGPASAAAAAAAGPGGYGGPGQQGPGQGQYGPGTGQQGQGPASAAAAAAAGPGGYGGPGQQGPGQGQYGPGTGQQGQGPGGQQGPGGASAAAAAAAGPGGYGGPGQQGPGQGQYGPGTGQQGQGPGGQQGPVGAAAAAAAAVSSGGYGSQGAGQGGQQGSGQRGPAAAGPGGYSGPGQQGPGQGGQQGPASAAAAAAAAAGPGGYGGSGQQGPGQGRGTGQQGQGPGGQQGPASAAAAAAAGPGGYGGPGQQGPGQGQYGPGTGQQGQGPASAAAAAAAGPGGYGGPGQQGPGQGQYGPGTGQQGQGPGGQQGPGGASAAAAAAAGDYKDDDDKDYKDDDDKDYKDDDDK

SEQ ID NO: 2793 - protein, 978 aa, synthetic construct
  REGION 1..978: note = Description of Artificial Sequence: Synthetic polypeptide
MRFPSIFTAVLFAASSALAAPVNTTTEDETAQIPAEAVIGYSDLEGDFDVAVLPFSNSTNNGLLFINTTIASIAAKEEGVSLEKREAEAGPGGYGPGQQGPGGYGPGQQGPGRYGPGQQGPSGPGSAAAAAAGSGQQGPGGYGPRQQGPGGYGQGQQGPSGPGSAAAASAAASAESGQQGPGGYGPGQQGPGGYGPGQQGPGGYGPGQQGPSGPGSAAAAAAAASGPGQQGPGGYGPGQQGPGGYGPGQQGPSGPGSAAAAAAAASGPGQQGPGGYGPGQQGPGGYGPGQQGLSGPGSAAAAAAAGPGGYGPGQQGPGGYGPGQQGPGRYGPGQQGPSGPGSAAAAAAGSGQQGPGGYGPRQQGPGGYGQGQQGPSGPGSAAAASAAASAESGQQGPGGYGPGQQGPGGYGPGQQGPGGYGPGQQGPSGPGSAAAAAAAASGPGQQGPGGYGPGQQGPGGYGPGQQGPSGPGSAAAAAAAASGPGQQGPGGYGPGQQGPGGYGPGQQGLSGPGSAAAAAAAGPGGYGPGQQGPGGYGPGQQGPGRYGPGQQGPSGPGSAAAAAAGSGQQGPGGYGPRQQGPGGYGQGQQGPSGPGSAAAASAAASAESGQQGPGGYGPGQQGPGGYGPGQQGPGGYGPGQQGPSGPGSAAAAAAAASGPGQQGPGGYGPGQQGPGGYGPGQQGPSGPGSAAAAAAAASGPGQQGPGGYGPGQQGPGGYGPGQQGLSGPGSAAAAAAAGPGGYGPGQQGPGGYGPGQQGPGRYGPGQQGPSGPGSAAAAAAGSGQQGPGGYGPRQQGPGGYGQGQQGPSGPGSAAAASAAASAESGQQGPGGYGPGQQGPGGYGPGQQGPGGYGPGQQGPSGPGSAAAAAAAASGPGQQGPGGYGPGQQGPGGYGPGQQGPSGPGSAAAAAAAASGPGQQGPGGYGPGQQGPGGYGPGQQGLSGPGSAAAAAAAGDYKDDDDKDYKDDDDKDYKDDDDK

SEQ ID NO: 2794 - protein, 1014 aa, synthetic construct
  REGION 1..1014: note = Description of Artificial Sequence: Synthetic polypeptide
MRFPSIFTAVLFAASSALAAPVNTTTEDETAQIPAEAVIGYSDLEGDFDVAVLPFSNSTNNGLLFINTTIASIAAKEEGVSLEKREAEAGRGPGGYGPGQQGPGGPGAAAAAAGPGGYGPGGYGPGQQGPGGPGAAAAAAAGRGPGGYGPGQQGPGQQGPGGSGAAAAAAGRGPGGYGPGQQGPGGPGAAAAAAGPGGYGPGQQGPGAAAAAAAAGRGPGGYGPGQQGPGGPGAAAAAAAGRGPGGYGPGQQGPGQQGPGGSGAAAAAAGRGPGGYGPGQQGPGGPGAAAAAAGPGGYGPGQQGPGAAAAAAAAGRGPGGYGPGQQGPGGPGAAAAAAGPGGYGPGGYGPGQQGPGGPGAAAAAAAGRGPGGYGPGQQGPGQQGPGGSGAAAAAAGRGPGGYGPGQQGPGGPGAAAAAAGPGGYGPGQQGPGAAAAAAAAGRGPGGYGPGQQGPGGPGAAAAAAAGRGPGGYGPGQQGPGQQGPGGSGAAAAAAGRGPGGYGPGQQGPGGPGAAAAAAGPGGYGPGQQGPGAAAAAAAAGRGPGGYGPGQQGPGGPGAAAAAAGPGGYGPGGYGPGQQGPGGPGAAAAAAAGRGPGGYGPGQQGPGQQGPGGSGAAAAAAGRGPGGYGPGQQGPGGPGAAAAAAGPGGYGPGQQGPGAAAAAAAAGRGPGGYGPGQQGPGGPGAAAAAAAGRGPGGYGPGQQGPGQQGPGGSGAAAAAAGRGPGGYGPGQQGPGGPGAAAAAAGPGGYGPGQQGPGAAAAAAAAGRGPGGYGPGQQGPGGPGAAAAAAGPGGYGPGGYGPGQQGPGGPGAAAAAAAGRGPGGYGPGQQGPGQQGPGGSGAAAAAAGRGPGGYGPGQQGPGGPGAAAAAAGPGGYGPGQQGPGAAAAAAAAGRGPGGYGPGQQGPGGPGAAAAAAAGRGPGGYGPGQQGPGQQGPGGSGAAAAAAGRGPGGYGPGQQGPGGPGAAAAAAGPGGYGPGQQGPGAAAAAAAAGDYKDDDDKDYKDDDDKDYKDDDDK

SEQ ID NO: 2795 - protein, 1014 aa, synthetic construct
  REGION 1..1014: note = Description of Artificial Sequence: Synthetic polypeptide
MRFPSIFTAVLFAASSALAAPVNTTTEDETAQIPAEAVIGYSDLEGDFDVAVLPFSNSTNNGLLFINTTIASIAAKEEGVSLEKREAEAGRGPGGYGPGQQGPGGSGAAAAAAGRGPGGYGPGQQGPGGPGAAAAAAGPGGYGPGQQGTGAAAAAAAGSGAGGYGPGQQGPGGPGAAAAAAGPGGYGPGQQGPGAAAAAAAGSGPGGYGPGQQGPGGSSAAAAAAGPGRYGPGQQGPGAAAAASAGRGPGGYGPGQQGPGGPGAAAAAAGPGGYGPGQQGPGAAAAAAAGSGPGGYGPGQQGPGGPGAAAAAAAGRGPGGYGPGQQGPGGSGAAAAAAGRGPGGYGPGQQGPGGPGAAAAAAGPGGYGPGQQGTGAAAAAAAGSGAGGYGPGQQGPGGPGAAAAAAGPGGYGPGQQGPGAAAAAAAGSGPGGYGPGQQGPGGSSAAAAAAGPGRYGPGQQGPGAAAAASAGRGPGGYGPGQQGPGGPGAAAAAAGPGGYGPGQQGPGAAAAAAAGSGPGGYGPGQQGPGGPGAAAAAAAGRGPGGYGPGQQGPGGSGAAAAAAGRGPGGYGPGQQGPGGPGAAAAAAGPGGYGPGQQGTGAAAAAAAGSGAGGYGPGQQGPGGPGAAAAAAGPGGYGPGQQGPGAAAAAAAGSGPGGYGPGQQGPGGSSAAAAAAGPGRYGPGQQGPGAAAAASAGRGPGGYGPGQQGPGGPGAAAAAAGPGGYGPGQQGPGAAAAAAAGSGPGGYGPGQQGPGGPGAAAAAAAGRGPGGYGPGQQGPGGSGAAAAAAGRGPGGYGPGQQGPGGPGAAAAAAGPGGYGPGQQGTGAAAAAAAGSGAGGYGPGQQGPGGPGAAAAAAGPGGYGPGQQGPGAAAAAAAGSGPGGYGPGQQGPGGSSAAAAAAGPGRYGPGQQGPGAAAAASAGRGPGGYGPGQQGPGGPGAAAAAAGPGGYGPGQQGPGAAAAAAAGSGPGGYGPGQQGPGGPGAAAAAAAGDYKDDDDKDYKDDDDKDYKDDDDK

SEQ ID NO: 2796 - protein, 978 aa, synthetic construct
  REGION 1..978: note = Description of Artificial Sequence: Synthetic polypeptide
MRFPSIFTAVLFAASSALAAPVNTTTEDETAQIPAEAVIGYSDLEGDFDVAVLPFSNSTNNGLLFINTTIASIAAKEEGVSLEKREAEAGRGPGGYGQGQQGPGGPGAAAAAAGPGGYGPGQQGPGAAAAAAAGSGPGGYGPGQQGPGRSGAAAAAAAAGRGPGGYGPGQQGPGGPGAAAAAAGPGGYGPGQQGPGAAAAASAGRGPGGYGPGQQGPGGSGAAAAAAGRGPGGYGPGQQGPGGPGAAAAAAAGRGPGGYGPGQQGPGQQGPGGSGAAAAAAGRGPGGYGPGQQGPGGPGAAAAAAGRGPGGYGQGQQGPGGPGAAAAAAGPGGYGPGQQGPGAAAAAAAGSGPGGYGPGQQGPGRSGAAAAAAAAGRGPGGYGPGQQGPGGPGAAAAAAGPGGYGPGQQGPGAAAAASAGRGPGGYGPGQQGPGGSGAAAAAAGRGPGGYGPGQQGPGGPGAAAAAAAGRGPGGYGPGQQGPGQQGPGGSGAAAAAAGRGPGGYGPGQQGPGGPGAAAAAAGRGPGGYGQGQQGPGGPGAAAAAAGPGGYGPGQQGPGAAAAAAAGSGPGGYGPGQQGPGRSGAAAAAAAAGRGPGGYGPGQQGPGGPGAAAAAAGPGGYGPGQQGPGAAAAASAGRGPGGYGPGQQGPGGSGAAAAAAGRGPGGYGPGQQGPGGPGAAAAAAAGRGPGGYGPGQQGPGQQGPGGSGAAAAAAGRGPGGYGPGQQGPGGPGAAAAAAGRGPGGYGQGQQGPGGPGAAAAAAGPGGYGPGQQGPGAAAAAAAGSGPGGYGPGQQGPGRSGAAAAAAAAGRGPGGYGPGQQGPGGPGAAAAAAGPGGYGPGQQGPGAAAAASAGRGPGGYGPGQQGPGGSGAAAAAAGRGPGGYGPGQQGPGGPGAAAAAAAGRGPGGYGPGQQGPGQQGPGGSGAAAAAAGRGPGGYGPGQQGPGGPGAAAAAAGDYKDDDDKDYKDDDDKDYKDDDDK

SEQ ID NO: 2797 - protein, 1010 aa, synthetic construct
  REGION 1..1010: note = Description of Artificial Sequence: Synthetic polypeptide
MRFPSIFTAVLFAASSALAAPVNTTTEDETAQIPAEAVIGYSDLEGDFDVAVLPFSNSTNNGLLFINTTIASIAAKEEGVSLEKREAEAGPGGYGPGQQRPGQQGPGGPGAAAAAAGRGPGGYGPGQQGPGGPGAAAAAAAGRGPGGYGPGQQGPGQQGPGGSGAAAAAAGRGPGGYGPGQQGPGGPGAAAAAAGPGGYGPGQQGPGAAAAAAAAGRGPGGYGPGQQGPGGPGAAAAAAAGRGPGGYGPGQQGPGQQGPGGPGAAAAAAGPGGYGPGQQGTGAAAAAAAGSGAGGYGPGQQGPGGPGAAAAAAGPGGYGPGQQRPGQQGPGGPGAAAAAAGRGPGGYGPGQQGPGGPGAAAAAAAGRGPGGYGPGQQGPGQQGPGGSGAAAAAAGRGPGGYGPGQQGPGGPGAAAAAAGPGGYGPGQQGPGAAAAAAAAGRGPGGYGPGQQGPGGPGAAAAAAAGRGPGGYGPGQQGPGQQGPGGPGAAAAAAGPGGYGPGQQGTGAAAAAAAGSGAGGYGPGQQGPGGPGAAAAAAGPGGYGPGQQRPGQQGPGGPGAAAAAAGRGPGGYGPGQQGPGGPGAAAAAAAGRGPGGYGPGQQGPGQQGPGGSGAAAAAAGRGPGGYGPGQQGPGGPGAAAAAAGPGGYGPGQQGPGAAAAAAAAGRGPGGYGPGQQGPGGPGAAAAAAAGRGPGGYGPGQQGPGQQGPGGPGAAAAAAGPGGYGPGQQGTGAAAAAAAGSGAGGYGPGQQGPGGPGAAAAAAGPGGYGPGQQRPGQQGPGGPGAAAAAAGRGPGGYGPGQQGPGGPGAAAAAAAGRGPGGYGPGQQGPGQQGPGGSGAAAAAAGRGPGGYGPGQQGPGGPGAAAAAAGPGGYGPGQQGPGAAAAAAAAGRGPGGYGPGQQGPGGPGAAAAAAAGRGPGGYGPGQQGPGQQGPGGPGAAAAAAGPGGYGPGQQGTGAAAAAAAGSGAGGYGPGQQGPGGPGAAAAAAGDYKDDDDKDYKDDDDKDYKDDDDK

SEQ ID NO: 2798 - protein, 862 aa, synthetic construct
  REGION 1..862: note = Description of Artificial Sequence: Synthetic polypeptide
MRFPSIFTAVLFAASSALAAPVNTTTEDETAQIPAEAVIGYSDLEGDFDVAVLPFSNSTNNGLLFINTTIASIAAKEEGVSLEKREAEAGSGPGGYGPGQQGPGRSGAAAAAAAAGRGPGGYGPGQQGPGGPGAAAAAAGPGGYGPGQQGPGAAAAASAGRGPGGYGPGQQGPGGSGAAAAAAGRGPGGYGPGQQGPGGPGAAAAAAAGTGPGGYGPGQQGPGGSGAAAAAAGRGPGGYGPGQQGPGGPGAAAAAAGPGGYGPGQQGPGAAAAAAAGSGPGGYGPGQQGPGRSGAAAAAAAAGRGPGGYGPGQQGPGGPGAAAAAAGPGGYGPGQQGPGAAAAASAGRGPGGYGPGQQGPGGSGAAAAAAGRGPGGYGPGQQGPGGPGAAAAAAAGTGPGGYGPGQQGPGGSGAAAAAAGRGPGGYGPGQQGPGGPGAAAAAAGPGGYGPGQQGPGAAAAAAAGSGPGGYGPGQQGPGRSGAAAAAAAAGRGPGGYGPGQQGPGGPGAAAAAAGPGGYGPGQQGPGAAAAASAGRGPGGYGPGQQGPGGSGAAAAAAGRGPGGYGPGQQGPGGPGAAAAAAAGTGPGGYGPGQQGPGGSGAAAAAAGRGPGGYGPGQQGPGGPGAAAAAAGPGGYGPGQQGPGAAAAAAAGSGPGGYGPGQQGPGRSGAAAAAAAAGRGPGGYGPGQQGPGGPGAAAAAAGPGGYGPGQQGPGAAAAASAGRGPGGYGPGQQGPGGSGAAAAAAGRGPGGYGPGQQGPGGPGAAAAAAAGTGPGGYGPGQQGPGGSGAAAAAAGRGPGGYGPGQQGPGGPGAAAAAAGPGGYGPGQQGPGAAAAAAAGDYKDDDDKDYKDDDDKDYKDDDDK

SEQ ID NO: 2799 - protein, 810 aa, synthetic construct
  REGION 1..810: note = Description of Artificial Sequence: Synthetic polypeptide
MRFPSIFTAVLFAASSALAAPVNTTTEDETAQIPAEAVIGYSDLEGDFDVAVLPFSNSTNNGLLFINTTIASIAAKEEGVSLEKREAEAGSGPGGYGPGQQGPGGPGAAAAAAGRGPGGYGPGQQGPGGPGAAAAAAAGRGPGGYGPGQQGPGGSGAAAAASGRGPGGSGPGGYGPGQQGPGAAAAAAAAGRGPGGYGPGQQGPGGPGAAAAAAAGRGPGGYGPGQQGPGGSGAAAAAAGRGPGGYGPGQQGPGGPGAAAAAAGSGPGGYGPGQQGPGGPGAAAAAAGRGPGGYGPGQQGPGGPGAAAAAAAGRGPGGYGPGQQGPGGSGAAAAASGRGPGGSGPGGYGPGQQGPGAAAAAAAAGRGPGGYGPGQQGPGGPGAAAAAAAGRGPGGYGPGQQGPGGSGAAAAAAGRGPGGYGPGQQGPGGPGAAAAAAGSGPGGYGPGQQGPGGPGAAAAAAGRGPGGYGPGQQGPGGPGAAAAAAAGRGPGGYGPGQQGPGGSGAAAAASGRGPGGSGPGGYGPGQQGPGAAAAAAAAGRGPGGYGPGQQGPGGPGAAAAAAAGRGPGGYGPGQQGPGGSGAAAAAAGRGPGGYGPGQQGPGGPGAAAAAAGSGPGGYGPGQQGPGGPGAAAAAAGRGPGGYGPGQQGPGGPGAAAAAAAGRGPGGYGPGQQGPGGSGAAAAASGRGPGGSGPGGYGPGQQGPGAAAAAAAAGRGPGGYGPGQQGPGGPGAAAAAAAGRGPGGYGPGQQGPGGSGAAAAAAGRGPGGYGPGQQGPGGPGAAAAAAGDYKDDDDKDYKDDDDKDYKDDDDK

SEQ ID NO: 2800 - protein, 738 aa, synthetic construct
  REGION 1..738: note = Description of Artificial Sequence: Synthetic polypeptide
MRFPSIFTAVLFAASSALAAPVNTTTEDETAQIPAEAVIGYSDLEGDFDVAVLPFSNSTNNGLLFINTTIASIAAKEEGVSLEKREAEAGPGGYGPGQQGPGAAAAAAGRGPGGYGPGQQGPGGSGAAAAAAGRGPGGYGPGQQGPGGPGAAAAAAGPGGYGPGQQGTGAAAAAAAGSGAGGYGPGQQGPGGPGAAAAAAGPGGYGPGQQGPGAAAAAAAGSGPGGYGPGQQGPGGPGAAAAAAAGPGGYGPGQQGPGAAAAAAGRGPGGYGPGQQGPGGSGAAAAAAGRGPGGYGPGQQGPGGPGAAAAAAGPGGYGPGQQGTGAAAAAAAGSGAGGYGPGQQGPGGPGAAAAAAGPGGYGPGQQGPGAAAAAAAGSGPGGYGPGQQGPGGPGAAAAAAAGPGGYGPGQQGPGAAAAAAGRGPGGYGPGQQGPGGSGAAAAAAGRGPGGYGPGQQGPGGPGAAAAAAGPGGYGPGQQGTGAAAAAAAGSGAGGYGPGQQGPGGPGAAAAAAGPGGYGPGQQGPGAAAAAAAGSGPGGYGPGQQGPGGPGAAAAAAAGPGGYGPGQQGPGAAAAAAGRGPGGYGPGQQGPGGSGAAAAAAGRGPGGYGPGQQGPGGPGAAAAAAGPGGYGPGQQGTGAAAAAAAGSGAGGYGPGQQGPGGPGAAAAAAGPGGYGPGQQGPGAAAAAAAGSGPGGYGPGQQGPGGPGAAAAAAAGDYKDDDDKDYKDDDDKDYKDDDDK

SEQ ID NO: 2801 - protein, 706 aa, synthetic construct
  REGION 1..706: note = Description of Artificial Sequence: Synthetic polypeptide
MRFPSIFTAVLFAASSALAAPVNTTTEDETAQIPAEAVIGYSDLEGDFDVAVLPFSNSTNNGLLFINTTIASIAAKEEGVSLEKREAEAGGYGPGSGQQGPGAGQQGPGAGQQGPYGPSAAAAAAAAGGYGPGGAGQQGPGAGQQGPGSQGQSGPGATVAAAAAGGYGPGGAGQQGPGAGQQGQGSQGPYGPAATAAAAAAGGYGPGSGQQGPGAGQQGPGGQGPYGPSAAAAAAAAGGYGPGSGQQGPGAGQQGPGAGQQGPYGPSAAAAAAAAGGYGPGGAGQQGPGAGQQGPGSQGQSGPGATVAAAAAGGYGPGGAGQQGPGAGQQGQGSQGPYGPAATAAAAAAGGYGPGSGQQGPGAGQQGPGGQGPYGPSAAAAAAAAGGYGPGSGQQGPGAGQQGPGAGQQGPYGPSAAAAAAAAGGYGPGGAGQQGPGAGQQGPGSQGQSGPGATVAAAAAGGYGPGGAGQQGPGAGQQGQGSQGPYGPAATAAAAAAGGYGPGSGQQGPGAGQQGPGGQGPYGPSAAAAAAAAGGYGPGSGQQGPGAGQQGPGAGQQGPYGPSAAAAAAAAGGYGPGGAGQQGPGAGQQGPGSQGQSGPGATVAAAAAGGYGPGGAGQQGPGAGQQGQGSQGPYGPAATAAAAAAGGYGPGSGQQGPGAGQQGPGGQGPYGPSAAAAAAAAGDYKDDDDKDYKDDDDKDYKDDDDK

SEQ ID NO: 2802 - DNA, 2688 bp, synthetic construct
  misc_feature 1..2688: note = Description of Artificial Sequence: Synthetic polynucleotide
  source 1..2688: mol_type = other DNA
gaaacgatgagatttccttcaatttttactgctgttttattcgcagcatcctccgcattagctgctccagtcaacactacaacagaagatgaaacggcacaaattccggctgaagctgtcatcggttactcagatttagaaggggatttcgatgttgctgttttgccattttccaacagcacaaataacgggttattgtttataaatactactattgccagcattgctgctaaagaagaaggggtatctctcgagaaaagagaggctgaagcaggtgcaggttacacgggaccatccggcccatcgactggtccatccggttacccaggtcctctaggtggtggagctccatttggacaaagtggcttcggaggtagtgatggtcctcaaggcggttttggtgccaccggtggtgctagcgctggtttaatctcacgagttgctaacgctttggccaacacttccacactaagaactgtacttagaactggagtgtctcaacagatagcaagtagtgttgtccagagagcagcacaatctcttgctagtactttaggcgttgacggcaataatctcgccagattcgcagttcaagcagtttccagattgcccgctggatctgatacttcagcatacgcacaggcattcagtagcgccctgtttaatgccggtgtgttgaatgccagtaacatcgacaccctaggtagtagagtcctgtccgctttactaaacggtgtaagctcagctgctcaaggtttgggcatcaacgtggattctggttctgttcaaagtgatatttcgtcatcttcaagtttcttgtctaccagcagctcctcggcttcttactctcaagctagtgccagttctacttcaggtgcaggttacacgggaccatccggcccatcgactggtccatccggttacccaggtcctctaggtggtggagctccatttggacaaagtggcttcggaggtagtgatggtcctcaaggcggttttggtgccaccggtggtgctagcgctggtttaatctcacgagttgctaacgctttggccaacacttccacactaagaactgtacttagaactggagtgtctcaacagatagcaagtagtgttgtccagagagcagcacaatctcttgctagtactttaggcgttgacggcaataatctcgccagattcgcagttcaagcagtttccagattgcccgctggatctgatacttcagcatacgcacaggcattcagtagcgccctgtttaatgccggtgtgttgaatgccagtaacatcgacaccctaggtagtagagtcctgtccgctttactaaacggtgtaagctcagctgctcaaggtttgggcatcaacgtggattctggttctgttcaaagtgatatttcgtcatcttcaagtttcttgtctaccagcagctcctcggcttcttactctcaagctagtgccagttctacttcaggtttcaccggagcaagctatcccggtccacaagtctcacagcctgcacctttcggcgtcggcccacaaccaggaggtgctctacctggttttggacaagtatctggagctcaaagtgcccttatttctagaatcgccaacgctttgggtaacaccgctactatgcgagctgtcttgcgcagcggagtgagtcaacaaattgtctcaaatgttgttcaaggagctgtgcaggcattatcatccagtctgggaattgatggtaataacttggcaaggattgcttctcagaccatactcagagtacctgctggttcggacactagcgcatacgctcaagcattttctactgccctgttcaattcgggtgttttgaacgctagtaatgtgaacacattgggctcccaggtggtatcgacgttgctgcgtggcatctcatcaacggcacaaggtcttggattaaacgtcgacgcaggttccgttcaatccgatataagttctagtagttcctttctgtctacttcctcgtcctccacctcatcttcacaaacaactgcagcaagtacgtcaggtttcaccggagcaagctatcccggtccacaagtctcacagcctgcacctttcggcgtcggcccacaaccaggaggtgctctacctggttttggacaagtatctggagctcaaagtgcccttatttctagaatcgccaacgctttgggtaacaccgctactatgcgagctgtcttgcgcagcggagtgagtcaacaaattgtctcaaatgttgttcaaggagctgtgcaggcattatcatccagtctgggaattgatggtaataacttggcaaggattgcttctcagaccatactcagagtacctgctggttcggacactagcgcatacgctcaagcattttctactgccctgttcaattcgggtgttttgaacgctagtaatgtgaacacattgggctcccaggtggtatcgacgttgctgcgtggcatctcatcaacggcacaaggtcttggattaaacgtcgacgcaggttccgttcaatccgatataagttctagtagttcctttctgtctacttcctcgtcctccacctcatcttcacaaacaactgcagcaagtacgtcaggtgactacaaagatgacgacgataaagattacaaagacgatgacgataaggactataaagatgatgacgacaaataataa

SEQ ID NO: 2803 - protein, 5 aa, synthetic construct
  REGION 1..5: note = Description of Artificial Sequence: Synthetic peptide
AAAAA

SEQ ID NO: 2804 - protein, 5 aa, synthetic construct
  REGION 1..5: note = Description of Artificial Sequence: Synthetic peptide
SGAGG

SEQ ID NO: 2805 - protein, 5 aa, synthetic construct
  REGION 1..5: note = Description of Artificial Sequence: Synthetic peptide
GSGAG

SEQ ID NO: 2806 - protein, 5 aa, synthetic construct
  REGION 1..5: note = Description of Artificial Sequence: Synthetic peptide
GGSGA

SEQ ID NO: 2807 - protein, 181 aa, Aliatypus gulosus; identical to SEQ ID NO: 1077

SEQ ID NO: 2808 - protein, 126 aa, Plectreurys tristis; identical to SEQ ID NO: 1574

SEQ ID NO: 2809 - protein, 239 aa, Plectreurys tristis; identical to SEQ ID NO: 1142

SEQ ID NO: 2810 - protein, 182 aa, Araneus gemmoides; identical to SEQ ID NO: 1150

SEQ ID NO: 2811 - protein, 180 aa, Argiope aurantia; identical to SEQ ID NO: 1158

SEQ ID NO: 2812 - protein, 199 aa, Deinopis spinosa; identical to SEQ ID NO: 1192

SEQ ID NO: 2813 - protein, 171 aa, Nephila clavipes; identical to SEQ ID NO: 1210

SEQ ID NO: 2814 - protein, 268 aa, Argiope trifasciata; identical to SEQ ID NO: 1252

SEQ ID NO: 2815 - protein, 420 aa, Nephila clavipes; identical to SEQ ID NO: 1733

SEQ ID NO: 2816 - protein, 376 aa, Latrodectus hesperus; identical to SEQ ID NO: 1751

SEQ ID NO: 2817 - protein, 200 aa, Argiope trifasciata; identical to SEQ ID NO: 1296

SEQ ID NO: 2818 - protein, 357 aa, Uloborus diversus; identical to SEQ ID NO: 1774

SEQ ID NO: 2819 - protein, 32 aa, Euprosthenops australis; identical to SEQ ID NO: 1941

SEQ ID NO: 2820 - protein, 42 aa, Tetragnatha kauaiensis; identical to SEQ ID NO: 2149

SEQ ID NO: 2821 - protein, 42 aa, Argiope aurantia; identical to SEQ ID NO: 1799

SEQ ID NO: 2822 - protein, 46 aa, Deinopis spinosa; identical to SEQ ID NO: 1866

SEQ ID NO: 2823 - protein, 42 aa, Nephila clavata; identical to SEQ ID NO: 2008

SEQ ID NO: 2824 - protein, 8 aa, synthetic construct
  REGION 1..8: note = Description of Artificial Sequence: Synthetic peptide
  REGION 1..8: note = misc_feature - This sequence may encompass 6-8 repeating residues wherein somepositions may be absent
HHHHHHHH

SEQ ID NO: 2825 - DNA, 12 bp, synthetic construct
  misc_feature 1..12: note = Description of Artificial Sequence: Synthetic oligonucleotide
  source 1..12: mol_type = other DNA
gaagacttagca

SEQ ID NO: 2826 - DNA, 11 bp, synthetic construct
  misc_feature 1..11: note = Description of Artificial Sequence: Synthetic oligonucleotide
  source 1..11: mol_type = other DNA
ggtacgtcttc

SEQ ID NO: 2827 - DNA, 30 bp, synthetic construct
  misc_feature 1..30: note = Description of Artificial Sequence: Synthetic primer
  source 1..30: mol_type = other DNA
ctaagaggcgcgcctaagcgatggtctcaa

SEQ ID NO: 2828 - DNA, 33 bp, synthetic construct
  misc_feature 1..33: note = Description of Artificial Sequence: Synthetic primer
  source 1..33: mol_type = other DNA
tgcatcggacgtcctatcgctacttctgcatgg

SEQ ID NO: 2829 - DNA, 49 bp, synthetic construct
  misc_feature 1..49: note = Description of Artificial Sequence: Synthetic primer
  source 1..49: mol_type = other DNA
ctaagaggcgcgcctaagcgatggtctcaaggtgcaggtgcaagggctg

SEQ ID NO: 2830 - DNA, 50 bp, synthetic construct
  misc_feature 1..50: note = Description of Artificial Sequence: Synthetic primer
  source 1..50: mol_type = other DNA
tgcatcggacgtcctatcgctacttctgcatggaggccgtatccgcggat

SEQ ID NO: 2831 - DNA, 60 bp, synthetic construct
  misc_feature 1..60: note = Description of Artificial Sequence: Synthetic primer
  source 1..60: mol_type = other DNA
aagacgatgacgataaggactataaagatgatgacgacaaataatgcggtagtttatcac

SEQ ID NO: 2832 - DNA, 60 bp, synthetic construct
  misc_feature 1..60: note = Description of Artificial Sequence: Synthetic primer
  source 1..60: mol_type = other DNA
ccagcgcctggaccgtaacccggccgcagcctgcgcagacatgttgctgaacgccatcgt

SEQ ID NO: 2833 - DNA, 10 bp, synthetic construct
  misc_feature 1..10: note = Description of Artificial Sequence: Synthetic oligonucleotide
  source 1..10: mol_type = other DNA
gaagacttaa

SEQ ID NO: 2834 - DNA, 38 bp, synthetic construct
  misc_feature 1..38: note = Description of Artificial Sequence: Synthetic primer
  source 1..38: mol_type = other DNA
ctaagaggtctcacaggtagtcaaggacctggttcagg

SEQ ID NO: 2835 - DNA, 36 bp, synthetic construct
  misc_feature 1..36: note = Description of Artificial Sequence: Synthetic primer
  source 1..36: mol_type = other DNA
ttcagtggtctctaccttgttgtcctccagatccag

SEQ ID NO: 2836 - DNA, 37 bp, synthetic construct
  misc_feature 1..37: note = Description of Artificial Sequence: Synthetic primer
  source 1..37: mol_type = other DNA
ctaagaggtctcacaggtcctggaggtcagggtccat

SEQ ID NO: 2837 - DNA, 41 bp, synthetic construct
  misc_feature 1..41: note = Description of Artificial Sequence: Synthetic primer
  source 1..41: mol_type = other DNA
ttcagtggtctctacctggtccctgttgaccagcaccagga

SEQ ID NO: 2838 - protein, 6 aa, synthetic construct
  REGION 1..6: note = Description of Artificial Sequence: Synthetic peptide
AAAAAA

SEQ ID NO: 2839 - DNA, 27 bp, synthetic construct
  misc_feature 1..27: note = Description of Artificial Sequence: Synthetic oligonucleotide
  source 1..27: mol_type = other DNA
ggcgcgccttagcgatggtctcaaggt

SEQ ID NO: 2840 - DNA, 28 bp, synthetic construct
  misc_feature 1..28: note = Description of Artificial Sequence: Synthetic oligonucleotide
  source 1..28: mol_type = other DNA
aggtacgtcttcatcgctatcctgcagg

SEQ ID NO: 2841 - DNA, 16 bp, synthetic construct
  misc_feature 1..16: note = Description of Artificial Sequence: Synthetic oligonucleotide
  source 1..16: mol_type = other DNA
gcgatggtctcaaggt

SEQ ID NO: 2842 - DNA, 17 bp, synthetic construct
  misc_feature 1..17: note = Description of Artificial Sequence: Synthetic oligonucleotide
  source 1..17: mol_type = other DNA
aggtacgtcttcatcgc

SEQ ID NO: 2843 - DNA, 19 bp, synthetic construct
  misc_feature 1..19: note = Description of Artificial Sequence: Synthetic oligonucleotide
  source 1..19: mol_type = other DNA
gaagactgacgtcgagacc

SEQ ID NO: 2844 - protein, 181 aa, Aliatypus gulosus; identical to SEQ ID NO: 1077
  source 1..181: note = Fibroin 1

SEQ ID NO: 2845 - protein, 126 aa, Plectreurys tristis; identical to SEQ ID NO: 1574
  source 1..126: note = Fibroin 1

SEQ ID NO: 2846 - protein, 239 aa, Plectreurys tristis; identical to SEQ ID NO: 1142
  source 1..239: note = Fibroin 4

SEQ ID NO: 2847 - protein, 182 aa, Araneus gemmoides; identical to SEQ ID NO: 1150
  source 1..182: note = TuSp

SEQ ID NO: 2848 - protein, 180 aa, Argiope aurantia; identical to SEQ ID NO: 1158
  source 1..180: note = TuSp

SEQ ID NO: 2849 - protein, 199 aa, Deinopis spinosa; identical to SEQ ID NO: 1192
  source 1..199: note = TuSp

SEQ ID NO: 2850 - protein, 171 aa, Nephila clavipes; identical to SEQ ID NO: 1210
  source 1..171: note = TuSp

SEQ ID NO: 2851 - protein, 268 aa, Argiope trifasciata; identical to SEQ ID NO: 1252
  source 1..268: note = Flag

SEQ ID NO: 2852 - protein, 420 aa, Nephila clavipes; identical to SEQ ID NO: 1733
  source 1..420: note = Flag

SEQ ID NO: 2853 - protein, 376 aa, Latrodectus hesperus; identical to SEQ ID NO: 1751
  source 1..376: note = AcSp

SEQ ID NO: 2854 - protein, 200 aa, Argiope trifasciata; identical to SEQ ID NO: 1296
  source 1..200: note = AcSp

SEQ ID NO: 2855 - protein, 357 aa, Uloborus diversus; identical to SEQ ID NO: 1774
  source 1..357: note = AcSp

SEQ ID NO: 2856 - protein, 32 aa, Euprosthenops australis; identical to SEQ ID NO: 1941
  source 1..32: note = MaSp1

SEQ ID NO: 2857 - protein, 42 aa, Tetragnatha kauaiensis; identical to SEQ ID NO: 2149
  source 1..42: note = MaSp1

SEQ ID NO: 2858 - protein, 42 aa, Argiope aurantia; identical to SEQ ID NO: 1799
  source 1..42: note = MaSp2

SEQ ID NO: 2859 - protein, 46 aa, Deinopis spinosa; identical to SEQ ID NO: 1866
  source 1..46: note = MaSp2

SEQ ID NO: 2860 - protein, 42 aa, Nephila clavata; identical to SEQ ID NO: 2008
  source 1..42: note = MaSp2

SEQ ID NO: 2861 - protein, 174 aa, Deinopis spinosa; identical to SEQ ID NO: 1115
  source 1..174: note = MiSp

SEQ ID NO: 2862 - protein, 149 aa, Latrodectus hesperus; identical to SEQ ID NO: 1226
  source 1..149: note = MiSp

SEQ ID NO: 2863 - protein, 161 aa, Nephila clavipes; identical to SEQ ID NO: 1234
  source 1..161: note = MiSp

SEQ ID NO: 2864 - protein, 186 aa, Nephilengys cruentata; identical to SEQ ID NO: 1239
  source 1..186: note = MiSp

SEQ ID NO: 2865 - protein, 132 aa, Uloborus diversus; identical to SEQ ID NO: 1246
  source 1..132: note = MiSp

SEQ ID NO: 2866 - protein, 198 aa, Uloborus diversus; identical to SEQ ID NO: 1249
  source 1..198: note = MiSp

SEQ ID NO: 2867 - protein, 190 aa, Araneus ventricosus; identical to SEQ ID NO: 1312
  source 1..190: note = MaSp1

SEQ ID NO: 2868 - protein, 166 aa, Dolomedes tenebrosus; identical to SEQ ID NO: 1345
  source 1..166: note = MaSp1

SEQ ID NO: 2869 - protein, 177 aa, Nephilengys cruentata; identical to SEQ ID NO: 1382
  source 1..177: note = MaSp

SEQ ID NO: 2870 - protein, 174 aa, Nephilengys cruentata; identical to SEQ ID NO: 1383
  source 1..174: note = MaSp

SEQ ID NO: 2871 - protein, 5 aa, unidentified
SGAGG

SEQ ID NO: 2872 - protein, 5 aa, unidentified
GSGAG

SEQ ID NO: 2873 - protein, 5 aa, unidentified
GGSGA

SEQ ID NO: 2874 - protein, 5 aa, unidentified
SGGQQ

SEQ ID NO: 2875 - protein, 5 aa, unidentified
GAGQQ

SEQ ID NO: 2876 - protein, 6 aa, unidentified
GQGOPY

SEQ ID NO: 2877 - protein, 4 aa, unidentified
AGQQ

SEQ ID NO: 2878 - protein, 945 aa, unidentified; identical to SEQ ID NO: 1398

SEQ ID NO: 2879 - protein, 315 aa, unidentified; identical to SEQ ID NO: 1396

What is claimed is:

1. A cosmetic, skin, or hair care composition having a silicone replacement, comprising:
one or more active ingredients for cosmetic, skin, or hair care, and
a silicone replacement component comprising a recombinant silk polypeptide,
wherein the composition is substantially free of silicone.

2. The composition of claim 1, wherein the silicone replacement component is present in a loading level less than conventional loading levels of a silicone while providing at least the same performance.

3. The composition of claim 2, wherein the performance is one or more of imparting a matte finish; detangling of hair; imparting a soft feel to skin; imparting a silky, smooth, and powdery feel; decrease in glossiness on the skin; enhanced shine on the hair; vibrant and efficient pigment delivery; easy spreadability; quick absorption time; wrinkle blurring effect; hair style retention; heat resistance for hair; UV and pollution defense; and increased viscosity.

4. The composition of any one of the preceding claims, wherein the recombinant silk polypeptide is present in the form of a powder.

5. The composition of claim 4, wherein the silicone replacement composition further comprises a solvent, and the powder is suspended in the solvent.

6. The composition of claim 5, wherein the solvent is an aqueous solvent, a polar solvent, a non-polar solvent, an oil solvent, a wax solvent, or a surfactant.

7. The composition of claim 5 or 6, wherein the silicone replacement composition further comprises a preservative or a chelating agent.

8. The composition of any one of claims 1 to 4, wherein the silicone replacement is the recombinant silk polypeptide.

9. The composition of any one of claims 1 to 4, wherein the silicone replacement comprises the recombinant silk polypeptide suspended in a diluent.

10. The composition of any one of claims 1 to 3, wherein the silicon elastomer replacement comprises the recombinant silk polypeptide as a randomly structured gel.

11. The composition of claim 10, wherein said gel comprises preservative agents or chelating agents.

12. The composition of any one of the preceding claims, wherein 1 part recombinant silk polypeptide is capable of providing a replacement of up to 60 parts silicone.

13. The composition of any one of the preceding claims, wherein the recombinant silk polypeptide is present in an amount of about 0.01 wt % to about 30 wt % based on the total weight of the composition.

14. The composition of claim 13, wherein said composition comprises based on the total weight of the composition 0.01 wt % to 0.5 wt % recombinant silk polypeptide, 0.05 wt % to 5 wt % recombinant silk polypeptide, 0.5 wt % to 5 wt % recombinant silk polypeptide, 1 wt % to 5 wt % recombinant silk polypeptide, or 5 wt % to 30 wt % recombinant silk polypeptide.

15. The composition of any one of the preceding claims, wherein the silicone replacement increases viscosity of the composition as measured by the G′ and G″ rheology curve as compared to a composition having the same amount of silicone, while maintain a G′ and G″ rheology curve having a substantially same shape as a G′ and G″ rheology curve for the composition having the same amount of silicone.

16. The composition of any one of the preceding claims, wherein the silicone replacement comprises the recombinant silk polypeptide suspended in a solvent.

17. The composition of claim 16, wherein the recombinant silk polypeptide is present in an amount of about 1 wt % to about 40 wt % based on the total weight of the silicone replacement.

18. The composition of claim 16 or 17, wherein the solvent is aqueous solvent, an alcohol, or an oil-based solvent.

19. The composition of claim 16 or 17, wherein the solvent is one or more of water, glycerin, deionized water, olive oil, and pentylene glycol.

20. The composition of any one of the preceding claims, wherein the recombinant silk polypeptide is greater than 100 amino acids in length.

21. The composition of any one of the preceding claims, wherein the recombinant silk polypeptide is self-assembled into a semicrystalline state.

22. The composition of claim 21, wherein the crystalline portion of said recombinant silk polypeptide is characterized by beta-sheet crosslinks.

23. The composition of any one of the preceding claims, wherein said recombinant silk has poor solubility in a solvent selected from the group consisting of: water at a pH from 3 to 8, other polar and non polar solvents (for example, hexanol, hexane, benzene), oils, waxes, surfactants (for example, anionic, non-ionic, cationic, amphoteric).

24. The composition of any one of the preceding claims, wherein said recombinant silk forms a heterogeneous dispersion in a solvent selected from the group consisting of: water at a pH from 3 to 8, other polar and nonpolar solvents (hexanol, hexane, benzene), oils, waxes, surfactants (anionic, non-ionic, cationic, amphoteric).

25. The composition of any one of the preceding claims, wherein said recombinant silk polypeptide comprises SEQ ID NO: 1.

26. The composition of any one of the preceding claims, wherein said composition is an SPF formulation, a color cosmetic, wash-off hair shampoo, skin serum, skin primer, or a hair serum.

27. The composition of any one of the preceding claims, wherein said composition comprises water.

28. The composition of any one of claims 1 to 27, wherein said composition comprises water, glycerin, and sodium benzoate.

29. The composition of any one of claims 1 to 27, wherein said composition comprises: Zinc Oxide, Aloe Barbadensis Leaf Juice, Water, Butyrospermum Parkii (Shea) Nut Extract, Camellia Sinesis (Green Tea) Leaf Extract, Caprylic/Capric Triglyceride, Capryloyl Glycerin/Sebacic Acid Copolymer, Caprylyl/Capryl Glucoside, Cetearyl Alcohol, Cetearyl Glucoside, Coco-caprate/caprylate, Coco-Glucoside, Coconut Alkanes, Diheptyl Succinate, Dipotassium Glycyrrhizate, Ethylhexylglycerin, Glycerin, Hydrolyzed Jojoba Esters, Isostearic Acid, Lecithin, Phenoxyethanol, Polyglyceryl-3 Polyricinoleate, Polyhydroxystearic Acid, Potassium Sorbate, Pyrus Malus (Apple) Fruit Extract, Sclerotium Gum, Sodium Benzoate, Sodium Phytate, Squalane, Tocopherol, Xanthan Gum, or any combination thereof.

30. The composition of any one of claims 1 to 27, wherein said composition comprises: water, brassica glycerides, caprylic/capric triglyceride, cetearyl alcohol, CI 77491, cucumber extract, gluconolactone, glycerin, glycerl stearate, Helianthus annuus (sunflower) seed wax, hydrogenated polycyclopentadiene, iron oxides, jojoba ester, lithospermum erythorhzon root extract, plyacrylate crosspolymer-y, polyglycerin-3, polyglyceryl-6 polyricinoleate, silica, Simmondsia chinensis (jojoba) seed oil, sodium benzoate, sodium stearoyl glutamate, tocopherol, or any combination thereof.

31. The composition of any one of claims 1 to 27, wherein said composition comprises: Water, Polyacrylate crosspolymer-6, Glycerin, Citric acid, Gluconolactone, Sodium benzoate, Cetrimonium Chloride, or any combination thereof.

32. The composition of any one of the preceding claims, wherein the composition further comprises a dye.

33. The composition of any one of the preceding claims, wherein the silicone is a silicone elastomer.
